United States Patent Application Publication US 2026/0373308 A1 - sequence listing, part 2

SEQ ID NO: 34354 - DNA, 21 bp, synthetic construct
  source 1..21: mol_type = other DNA
atcaaggaccaaagtgggtgc

SEQ ID NO: 34355 - DNA, 21 bp, synthetic construct
  source 1..21: mol_type = other DNA
cagcaaccaaaagaaacctgt

SEQ ID NO: 34356 - DNA, 21 bp, synthetic construct
  source 1..21: mol_type = other DNA
tatgtgaaagtgtgtaaggat

SEQ ID NO: 34357 - DNA, 21 bp, synthetic construct
  source 1..21: mol_type = other DNA
tgcatgccgcaggctggacgc

SEQ ID NO: 34358 - DNA, 21 bp, synthetic construct
  source 1..21: mol_type = other DNA
tacacgaagttagacatgaac

SEQ ID NO: 34359 - DNA, 21 bp, synthetic construct
  source 1..21: mol_type = other DNA
tgtaaaccaaccagcctcaac

SEQ ID NO: 34360 - DNA, 21 bp, synthetic construct
  source 1..21: mol_type = other DNA
tatttcgcgggaaagatggcg

SEQ ID NO: 34361 - DNA, 21 bp, synthetic construct
  source 1..21: mol_type = other DNA
ggggggcctactatgtgttac

SEQ ID NO: 34362 - DNA, 21 bp, synthetic construct
  source 1..21: mol_type = other DNA
ggatgtggcactaagatgggc

SEQ ID NO: 34363 - DNA, 21 bp, synthetic construct
  source 1..21: mol_type = other DNA
tgtaagcccccaatgggtgca

SEQ ID NO: 34364 - DNA, 21 bp, synthetic construct
  source 1..21: mol_type = other DNA
tacgcaaggatgggccataat

SEQ ID NO: 34365 - DNA, 21 bp, synthetic construct
  source 1..21: mol_type = other DNA
tggttcacaggggtaaaggaa

SEQ ID NO: 34366 - DNA, 21 bp, synthetic construct
  source 1..21: mol_type = other DNA
ttgtctaagaacaactataat

SEQ ID NO: 34367 - DNA, 21 bp, synthetic construct
  source 1..21: mol_type = other DNA
tattctaagatgggtgagaat

SEQ ID NO: 34368 - DNA, 21 bp, synthetic construct
  source 1..21: mol_type = other DNA
tgcaaagctctcagtagagag

SEQ ID NO: 34369 - DNA, 21 bp, synthetic construct
  source 1..21: mol_type = other DNA
ggaggaggatcttccctatgg

SEQ ID NO: 34370 - DNA, 21 bp, synthetic construct
  source 1..21: mol_type = other DNA
tactctagaattacgcctaat

SEQ ID NO: 34371 - DNA, 21 bp, synthetic construct
  source 1..21: mol_type = other DNA
gggaatgcgacgtctcattgg

SEQ ID NO: 34372 - DNA, 21 bp, synthetic construct
  source 1..21: mol_type = other DNA
tgcaagccgaggtctgctgag

SEQ ID NO: 34373 - DNA, 21 bp, synthetic construct
  source 1..21: mol_type = other DNA
ttgtggaaagagtgcaaacca

SEQ ID NO: 34374 - DNA, 21 bp, synthetic construct
  source 1..21: mol_type = other DNA
tatactcccggttgcaaggaa

SEQ ID NO: 34375 - DNA, 21 bp, synthetic construct
  source 1..21: mol_type = other DNA
tatgtaaagtcacaacccgtc

SEQ ID NO: 34376 - DNA, 21 bp, synthetic construct
  source 1..21: mol_type = other DNA
tattgggggggcattactgaa

SEQ ID NO: 34377 - DNA, 21 bp, synthetic construct
  source 1..21: mol_type = other DNA
tgcaaacctggagctggcgaa

SEQ ID NO: 34378 - DNA, 21 bp, synthetic construct
  source 1..21: mol_type = other DNA
taccacagaagttcctcaaac

SEQ ID NO: 34379 - DNA, 21 bp, synthetic construct
  source 1..21: mol_type = other DNA
tattacacgggggttatgtct

SEQ ID NO: 34380 - DNA, 21 bp, synthetic construct
  source 1..21: mol_type = other DNA
tgcggcgaggccatccttatg

SEQ ID NO: 34381 - DNA, 21 bp, synthetic construct
  source 1..21: mol_type = other DNA
agaagcgacttcataccgttc

SEQ ID NO: 34382 - DNA, 21 bp, synthetic construct
  source 1..21: mol_type = other DNA
ttttcacgtgcggggcagaat

SEQ ID NO: 34383 - DNA, 21 bp, synthetic construct
  source 1..21: mol_type = other DNA
ataatgggcgaccgaacctgg

SEQ ID NO: 34384 - DNA, 21 bp, synthetic construct
  source 1..21: mol_type = other DNA
gtcgcctcaatgggaatcggt

SEQ ID NO: 34385 - DNA, 21 bp, synthetic construct
  source 1..21: mol_type = other DNA
ccaaagggtccatgcgatgcc

SEQ ID NO: 34386 - DNA, 21 bp, synthetic construct
  source 1..21: mol_type = other DNA
tttcgttctactaacggagtt

SEQ ID NO: 34387 - DNA, 21 bp, synthetic construct
  source 1..21: mol_type = other DNA
tgtccaccgaagaaaacggat

SEQ ID NO: 34388 - DNA, 21 bp, synthetic construct
  source 1..21: mol_type = other DNA
tggtttagtggccaaagagag

SEQ ID NO: 34389 - DNA, 21 bp, synthetic construct
  source 1..21: mol_type = other DNA
tgcaagagcggccaaggggcg

SEQ ID NO: 34390 - DNA, 21 bp, synthetic construct
  source 1..21: mol_type = other DNA
tgcaaaccgggcactgtcatg

SEQ ID NO: 34391 - DNA, 21 bp, synthetic construct
  source 1..21: mol_type = other DNA
tatagtaggggtaacaccaat

SEQ ID NO: 34392 - DNA, 21 bp, synthetic construct
  source 1..21: mol_type = other DNA
gtgaatgatttcaagatcttt

SEQ ID NO: 34393 - DNA, 21 bp, synthetic construct
  source 1..21: mol_type = other DNA
ctggctaaaaacggatgtaac

SEQ ID NO: 34394 - DNA, 21 bp, synthetic construct
  source 1..21: mol_type = other DNA
tgtaaaacgttcagcaaggag

SEQ ID NO: 34395 - DNA, 21 bp, synthetic construct
  source 1..21: mol_type = other DNA
gccctacctccaaaatgcagt

SEQ ID NO: 34396 - DNA, 21 bp, synthetic construct
  source 1..21: mol_type = other DNA
tgcaaaaaaaacggaatggag

SEQ ID NO: 34397 - DNA, 21 bp, synthetic construct
  source 1..21: mol_type = other DNA
ttaccgagaccttgcagtgag

SEQ ID NO: 34398 - DNA, 21 bp, synthetic construct
  source 1..21: mol_type = other DNA
gcccattgcaagggcccggaa

SEQ ID NO: 34399 - DNA, 21 bp, synthetic construct
  source 1..21: mol_type = other DNA
cgcgaaccgacctgcccgaga

SEQ ID NO: 34400 - DNA, 21 bp, synthetic construct
  source 1..21: mol_type = other DNA
tacaacagcacgcatgggcgt

SEQ ID NO: 34401 - DNA, 21 bp, synthetic construct
  source 1..21: mol_type = other DNA
tacatgcccgggtgtaaggaa

SEQ ID NO: 34402 - DNA, 21 bp, synthetic construct
  source 1..21: mol_type = other DNA
taccatgctctcaacaaaccc

SEQ ID NO: 34403 - DNA, 21 bp, synthetic construct
  source 1..21: mol_type = other DNA
tacttcagcggatatcccgac

SEQ ID NO: 34404 - DNA, 21 bp, synthetic construct
  source 1..21: mol_type = other DNA
ttcagcaaagttggaaataat

SEQ ID NO: 34405 - DNA, 21 bp, synthetic construct
  source 1..21: mol_type = other DNA
tatttcacagcacgggtcgaa

SEQ ID NO: 34406 - DNA, 21 bp, synthetic construct
  source 1..21: mol_type = other DNA
gttccagaaaaatgtcccggt

SEQ ID NO: 34407 - DNA, 21 bp, synthetic construct
  source 1..21: mol_type = other DNA
tatgcaaaacaaggcttgaac

SEQ ID NO: 34408 - DNA, 21 bp, synthetic construct
  source 1..21: mol_type = other DNA
ctatctaagaacgggcccaac

SEQ ID NO: 34409 - DNA, 21 bp, synthetic construct
  source 1..21: mol_type = other DNA
aaggacgactacacaagcttt

SEQ ID NO: 34410 - DNA, 21 bp, synthetic construct
  source 1..21: mol_type = other DNA
ctctcggatttcaaaatatac

SEQ ID NO: 34411 - DNA, 21 bp, synthetic construct
  source 1..21: mol_type = other DNA
taccagtcaacaaacggtata

SEQ ID NO: 34412 - DNA, 21 bp, synthetic construct
  source 1..21: mol_type = other DNA
ggcgaacctggagtccgctgg

SEQ ID NO: 34413 - DNA, 21 bp, synthetic construct
  source 1..21: mol_type = other DNA
tacgcacgtggaaatactaac

SEQ ID NO: 34414 - DNA, 21 bp, synthetic construct
  source 1..21: mol_type = other DNA
tgcaaggttattagcccgccg

SEQ ID NO: 34415 - DNA, 21 bp, synthetic construct
  source 1..21: mol_type = other DNA
tggtattcagggattatcgct

SEQ ID NO: 34416 - DNA, 21 bp, synthetic construct
  source 1..21: mol_type = other DNA
cgagaagatcatactagctgg

SEQ ID NO: 34417 - DNA, 21 bp, synthetic construct
  source 1..21: mol_type = other DNA
tatagcaaatggaactcaaat

SEQ ID NO: 34418 - DNA, 21 bp, synthetic construct
  source 1..21: mol_type = other DNA
tgcaaacctccaaagctagaa

SEQ ID NO: 34419 - DNA, 21 bp, synthetic construct
  source 1..21: mol_type = other DNA
tacagtaagaacaatattaat

SEQ ID NO: 34420 - DNA, 21 bp, synthetic construct
  source 1..21: mol_type = other DNA
cggttggaaagctcattgtgg

SEQ ID NO: 34421 - DNA, 21 bp, synthetic construct
  source 1..21: mol_type = other DNA
tattccaagaacggccacaac

SEQ ID NO: 34422 - DNA, 21 bp, synthetic construct
  source 1..21: mol_type = other DNA
cgtactccaacgtgcgccgca

SEQ ID NO: 34423 - DNA, 21 bp, synthetic construct
  source 1..21: mol_type = other DNA
tatttcagtggcactataact

SEQ ID NO: 34424 - DNA, 21 bp, synthetic construct
  source 1..21: mol_type = other DNA
ttatgggacgggacggaagcc

SEQ ID NO: 34425 - DNA, 21 bp, synthetic construct
  source 1..21: mol_type = other DNA
cacccagaaactaagtgtccg

SEQ ID NO: 34426 - DNA, 21 bp, synthetic construct
  source 1..21: mol_type = other DNA
cgtccagaaagcgtacgttgg

SEQ ID NO: 34427 - DNA, 21 bp, synthetic construct
  source 1..21: mol_type = other DNA
tacgttcgttcagactcaacg

SEQ ID NO: 34428 - DNA, 21 bp, synthetic construct
  source 1..21: mol_type = other DNA
tgtatatctaaaactggtcac

SEQ ID NO: 34429 - DNA, 21 bp, synthetic construct
  source 1..21: mol_type = other DNA
ggttgcggaactaaaaatggg

SEQ ID NO: 34430 - DNA, 21 bp, synthetic construct
  source 1..21: mol_type = other DNA
atctcggagtttaaaatttac

SEQ ID NO: 34431 - DNA, 21 bp, synthetic construct
  source 1..21: mol_type = other DNA
tactcacgtcagaacagtaac

SEQ ID NO: 34432 - DNA, 21 bp, synthetic construct
  source 1..21: mol_type = other DNA
cgaggcgatgggaattactgg

SEQ ID NO: 34433 - DNA, 21 bp, synthetic construct
  source 1..21: mol_type = other DNA
tacgcccgccagggagacaat

SEQ ID NO: 34434 - DNA, 21 bp, synthetic construct
  source 1..21: mol_type = other DNA
tggtggcatggaaggcccgaa

SEQ ID NO: 34435 - DNA, 21 bp, synthetic construct
  source 1..21: mol_type = other DNA
tatagccgtcatgggagcaat

SEQ ID NO: 34436 - DNA, 21 bp, synthetic construct
  source 1..21: mol_type = other DNA
tatcacgcccttaataagcca

SEQ ID NO: 34437 - DNA, 21 bp, synthetic construct
  source 1..21: mol_type = other DNA
ttatggacaggggagaacgca

SEQ ID NO: 34438 - DNA, 21 bp, synthetic construct
  source 1..21: mol_type = other DNA
cgggatgacttcatctccttc

SEQ ID NO: 34439 - DNA, 21 bp, synthetic construct
  source 1..21: mol_type = other DNA
gacttgcagtcgtcgaactgg

SEQ ID NO: 34440 - DNA, 21 bp, synthetic construct
  source 1..21: mol_type = other DNA
tactcccgcatgaactataac

SEQ ID NO: 34441 - DNA, 21 bp, synthetic construct
  source 1..21: mol_type = other DNA
gttatatcgagcaacggagtt

SEQ ID NO: 34442 - DNA, 21 bp, synthetic construct
  source 1..21: mol_type = other DNA
gtgagtactcatatttgtgcg

SEQ ID NO: 34443 - DNA, 21 bp, synthetic construct
  source 1..21: mol_type = other DNA
tgtaaggcagtctcgagggac

SEQ ID NO: 34444 - DNA, 21 bp, synthetic construct
  source 1..21: mol_type = other DNA
tgcaggcctgaagcaaaaagc

SEQ ID NO: 34445 - DNA, 21 bp, synthetic construct
  source 1..21: mol_type = other DNA
ggaagcgactttgtgcgatgg

SEQ ID NO: 34446 - DNA, 21 bp, synthetic construct
  source 1..21: mol_type = other DNA
tatggcaaagttggctgccag

SEQ ID NO: 34447 - DNA, 21 bp, synthetic construct
  source 1..21: mol_type = other DNA
tgtaaaaaacagctccaagat

SEQ ID NO: 34448 - DNA, 21 bp, synthetic construct
  source 1..21: mol_type = other DNA
tgcaaaccaggcaccctcgat

SEQ ID NO: 34449 - DNA, 21 bp, synthetic construct
  source 1..21: mol_type = other DNA
tgtaaacccagaagcggggaa

SEQ ID NO: 34450 - DNA, 21 bp, synthetic construct
  source 1..21: mol_type = other DNA
tgtaaacctgggatgggcagc

SEQ ID NO: 34451 - DNA, 21 bp, synthetic construct
  source 1..21: mol_type = other DNA
aaagatggctacagcatgtat

SEQ ID NO: 34452 - DNA, 21 bp, synthetic construct
  source 1..21: mol_type = other DNA
aaaccggatcacgtaagatgg

SEQ ID NO: 34453 - DNA, 21 bp, synthetic construct
  source 1..21: mol_type = other DNA
tgtcgtgctcagacgctcgat

SEQ ID NO: 34454 - DNA, 21 bp, synthetic construct
  source 1..21: mol_type = other DNA
acccatagtagcaatggtgtc

SEQ ID NO: 34455 - DNA, 21 bp, synthetic construct
  source 1..21: mol_type = other DNA
tactcgcgactctctcccgaa

SEQ ID NO: 34456 - DNA, 21 bp, synthetic construct
  source 1..21: mol_type = other DNA
tgcacctcaaagaccgggccg

SEQ ID NO: 34457 - DNA, 21 bp, synthetic construct
  source 1..21: mol_type = other DNA
agaacgtatacggagtttcct

SEQ ID NO: 34458 - DNA, 21 bp, synthetic construct
  source 1..21: mol_type = other DNA
tattttcaaggggtcattgca

SEQ ID NO: 34459 - DNA, 21 bp, synthetic construct
  source 1..21: mol_type = other DNA
tatagtaaagcacagggtgta

SEQ ID NO: 34460 - DNA, 21 bp, synthetic construct
  source 1..21: mol_type = other DNA
gggatggagcctgtccggtgg

SEQ ID NO: 34461 - DNA, 21 bp, synthetic construct
  source 1..21: mol_type = other DNA
gactacgcctactcacgggag

SEQ ID NO: 34462 - DNA, 21 bp, synthetic construct
  source 1..21: mol_type = other DNA
tggatctcgacgaatggcgta

SEQ ID NO: 34463 - DNA, 21 bp, synthetic construct
  source 1..21: mol_type = other DNA
tatgaacccccgtgcaaggaa

SEQ ID NO: 34464 - DNA, 21 bp, synthetic construct
  source 1..21: mol_type = other DNA
tattttcaagggattccgtta

SEQ ID NO: 34465 - DNA, 21 bp, synthetic construct
  source 1..21: mol_type = other DNA
tactttcaaggagtgcgggat

SEQ ID NO: 34466 - DNA, 21 bp, synthetic construct
  source 1..21: mol_type = other DNA
tgtaaaccgggtagccctttg

SEQ ID NO: 34467 - DNA, 21 bp, synthetic construct
  source 1..21: mol_type = other DNA
tatatgagtacaaacggagtg

SEQ ID NO: 34468 - DNA, 21 bp, synthetic construct
  source 1..21: mol_type = other DNA
tgtaacaaaacctctgtcaca

SEQ ID NO: 34469 - DNA, 21 bp, synthetic construct
  source 1..21: mol_type = other DNA
tgtacaccggattacagagag

SEQ ID NO: 34470 - DNA, 21 bp, synthetic construct
  source 1..21: mol_type = other DNA
ttcgccagaacaggtcagaat

SEQ ID NO: 34471 - DNA, 21 bp, synthetic construct
  source 1..21: mol_type = other DNA
tactctaagaatggcatgaat

SEQ ID NO: 34472 - DNA, 21 bp, synthetic construct
  source 1..21: mol_type = other DNA
agatcggaatatacggtgtat

SEQ ID NO: 34473 - DNA, 21 bp, synthetic construct
  source 1..21: mol_type = other DNA
tggttctctggcataactgaa

SEQ ID NO: 34474 - DNA, 21 bp, synthetic construct
  source 1..21: mol_type = other DNA
tattggtcgagtgtgaaggac

SEQ ID NO: 34475 - DNA, 21 bp, synthetic construct
  source 1..21: mol_type = other DNA
tatcatagcaccaacgggatt

SEQ ID NO: 34476 - DNA, 21 bp, synthetic construct
  source 1..21: mol_type = other DNA
tgcaaaggcggcggggctggt

SEQ ID NO: 34477 - DNA, 21 bp, synthetic construct
  source 1..21: mol_type = other DNA
gacggaggcacaagtaggtat

SEQ ID NO: 34478 - DNA, 21 bp, synthetic construct
  source 1..21: mol_type = other DNA
tttttttcaggaacccatgag

SEQ ID NO: 34479 - DNA, 21 bp, synthetic construct
  source 1..21: mol_type = other DNA
aagaatgaatacgtgaaatgg

SEQ ID NO: 34480 - DNA, 21 bp, synthetic construct
  source 1..21: mol_type = other DNA
agaaacgacttcgtcagttgg

SEQ ID NO: 34481 - DNA, 21 bp, synthetic construct
  source 1..21: mol_type = other DNA
tgcaaacccgacaaaccgtta

SEQ ID NO: 34482 - DNA, 21 bp, synthetic construct
  source 1..21: mol_type = other DNA
ttctacagcggagtaaaggaa

SEQ ID NO: 34483 - DNA, 21 bp, synthetic construct
  source 1..21: mol_type = other DNA
tgcaataagccaatggtcgcg

SEQ ID NO: 34484 - DNA, 21 bp, synthetic construct
  source 1..21: mol_type = other DNA
ttctggagcggaactatcgat

SEQ ID NO: 34485 - DNA, 21 bp, synthetic construct
  source 1..21: mol_type = other DNA
tacgccaaagggaatatgaac

SEQ ID NO: 34486 - DNA, 21 bp, synthetic construct
  source 1..21: mol_type = other DNA
tacttcgcaggggttacagcc

SEQ ID NO: 34487 - DNA, 21 bp, synthetic construct
  source 1..21: mol_type = other DNA
gatcgcaagccctgtcctgcg

SEQ ID NO: 34488 - DNA, 21 bp, synthetic construct
  source 1..21: mol_type = other DNA
tgtaaaatggataacactcct

SEQ ID NO: 34489 - DNA, 21 bp, synthetic construct
  source 1..21: mol_type = other DNA
tacaaagaaccatgtatctca

SEQ ID NO: 34490 - DNA, 21 bp, synthetic construct
  source 1..21: mol_type = other DNA
tatgcccgggggggtgtaaac

SEQ ID NO: 34491 - DNA, 21 bp, synthetic construct
  source 1..21: mol_type = other DNA
cgctcagattttatccccttc

SEQ ID NO: 34492 - DNA, 21 bp, synthetic construct
  source 1..21: mol_type = other DNA
ccatggtcatcgaacggggtg

SEQ ID NO: 34493 - DNA, 21 bp, synthetic construct
  source 1..21: mol_type = other DNA
tatttttctggtacccaaaga

SEQ ID NO: 34494 - DNA, 21 bp, synthetic construct
  source 1..21: mol_type = other DNA
tatgcccgagggggacagaat

SEQ ID NO: 34495 - DNA, 21 bp, synthetic construct
  source 1..21: mol_type = other DNA
ttgtgccgtccgatgagcgag

SEQ ID NO: 34496 - DNA, 21 bp, synthetic construct
  source 1..21: mol_type = other DNA
tattctcggagcaacatgaat

SEQ ID NO: 34497 - DNA, 21 bp, synthetic construct
  source 1..21: mol_type = other DNA
ggcagtgagtttagtacctat

SEQ ID NO: 34498 - DNA, 21 bp, synthetic construct
  source 1..21: mol_type = other DNA
caggattcaactaatgggcgc

SEQ ID NO: 34499 - DNA, 21 bp, synthetic construct
  source 1..21: mol_type = other DNA
tattggacgggcatgccggaa

SEQ ID NO: 34500 - DNA, 21 bp, synthetic construct
  source 1..21: mol_type = other DNA
ggaccagaaggggtgcgttgg

SEQ ID NO: 34501 - DNA, 21 bp, synthetic construct
  source 1..21: mol_type = other DNA
cgtacgcccaccttatatcct

SEQ ID NO: 34502 - DNA, 21 bp, synthetic construct
  source 1..21: mol_type = other DNA
tttggaaaaggagaatgggct

SEQ ID NO: 34503 - DNA, 21 bp, synthetic construct
  source 1..21: mol_type = other DNA
tactttacaggatcgatggat

SEQ ID NO: 34504 - DNA, 21 bp, synthetic construct
  source 1..21: mol_type = other DNA
tacttcactgggatgcaatcg

SEQ ID NO: 34505 - DNA, 21 bp, synthetic construct
  source 1..21: mol_type = other DNA
tatagtcgccagaattttaac

SEQ ID NO: 34506 - DNA, 21 bp, synthetic construct
  source 1..21: mol_type = other DNA
tggttctcgggacagcgtgaa

SEQ ID NO: 34507 - DNA, 21 bp, synthetic construct
  source 1..21: mol_type = other DNA
cgaatgttggatgtgtttccc

SEQ ID NO: 34508 - DNA, 21 bp, synthetic construct
  source 1..21: mol_type = other DNA
tatgagccgggttgcaaacaa

SEQ ID NO: 34509 - DNA, 21 bp, synthetic construct
  source 1..21: mol_type = other DNA
aaagacgattataagacctgg

SEQ ID NO: 34510 - DNA, 21 bp, synthetic construct
  source 1..21: mol_type = other DNA
accagtgattacgagagctat

SEQ ID NO: 34511 - DNA, 21 bp, synthetic construct
  source 1..21: mol_type = other DNA
ctgcaccgggagagccccaac

SEQ ID NO: 34512 - DNA, 21 bp, synthetic construct
  source 1..21: mol_type = other DNA
tacagcagggctaatcacaac

SEQ ID NO: 34513 - DNA, 21 bp, synthetic construct
  source 1..21: mol_type = other DNA
ttttttagcggtcaacatgaa

SEQ ID NO: 34514 - DNA, 21 bp, synthetic construct
  source 1..21: mol_type = other DNA
tacttttcaggaatgcctgac

SEQ ID NO: 34515 - DNA, 21 bp, synthetic construct
  source 1..21: mol_type = other DNA
cagcgatatgatgcctacgag

SEQ ID NO: 34516 - DNA, 21 bp, synthetic construct
  source 1..21: mol_type = other DNA
ttctttactggcaaagttagc

SEQ ID NO: 34517 - DNA, 21 bp, synthetic construct
  source 1..21: mol_type = other DNA
aatatgtcagaggcgaagtgg

SEQ ID NO: 34518 - DNA, 21 bp, synthetic construct
  source 1..21: mol_type = other DNA
caaaccaaatccgaacagtgc

SEQ ID NO: 34519 - DNA, 21 bp, synthetic construct
  source 1..21: mol_type = other DNA
ttcagccgcgcagggactaac

SEQ ID NO: 34520 - DNA, 21 bp, synthetic construct
  source 1..21: mol_type = other DNA
tatgtttactctgacagtagg

SEQ ID NO: 34521 - DNA, 21 bp, synthetic construct
  source 1..21: mol_type = other DNA
tatagctacgcgggagggggt

SEQ ID NO: 34522 - DNA, 21 bp, synthetic construct
  source 1..21: mol_type = other DNA
tatgcccggaccagtggtaac

SEQ ID NO: 34523 - DNA, 21 bp, synthetic construct
  source 1..21: mol_type = other DNA
agagagccaacttgtccccgc

SEQ ID NO: 34524 - DNA, 21 bp, synthetic construct
  source 1..21: mol_type = other DNA
agcatgggtgaccggagttgg

SEQ ID NO: 34525 - DNA, 21 bp, synthetic construct
  source 1..21: mol_type = other DNA
cgtgaatacgatagcttccca

SEQ ID NO: 34526 - DNA, 21 bp, synthetic construct
  source 1..21: mol_type = other DNA
cgcctggaggcaagcgtatgg

SEQ ID NO: 34527 - DNA, 21 bp, synthetic construct
  source 1..21: mol_type = other DNA
cgtaacgattacaactacccg

SEQ ID NO: 34528 - DNA, 21 bp, synthetic construct
  source 1..21: mol_type = other DNA
cgcatggaagttggagactgg

SEQ ID NO: 34529 - DNA, 21 bp, synthetic construct
  source 1..21: mol_type = other DNA
ttcagtaagctgaatccagat

SEQ ID NO: 34530 - DNA, 21 bp, synthetic construct
  source 1..21: mol_type = other DNA
tgtaaaccgggggtccctccc

SEQ ID NO: 34531 - DNA, 21 bp, synthetic construct
  source 1..21: mol_type = other DNA
tatagcagaatcggcccgacg

SEQ ID NO: 34532 - DNA, 21 bp, synthetic construct
  source 1..21: mol_type = other DNA
agaaccgcgggcgtatttccg

SEQ ID NO: 34533 - DNA, 21 bp, synthetic construct
  source 1..21: mol_type = other DNA
taccacgccctaaataaacct

SEQ ID NO: 34534 - DNA, 21 bp, synthetic construct
  source 1..21: mol_type = other DNA
tacactaaagcgcaaatgaat

SEQ ID NO: 34535 - DNA, 21 bp, synthetic construct
  source 1..21: mol_type = other DNA
tgtgaaacgaagaaaccatca

SEQ ID NO: 34536 - DNA, 21 bp, synthetic construct
  source 1..21: mol_type = other DNA
tactataccggagtgacaaag

SEQ ID NO: 34537 - DNA, 21 bp, synthetic construct
  source 1..21: mol_type = other DNA
aattacgttaagagcacctgc

SEQ ID NO: 34538 - DNA, 21 bp, synthetic construct
  source 1..21: mol_type = other DNA
tttttttcaggccaaattgct

SEQ ID NO: 34539 - DNA, 21 bp, synthetic construct
  source 1..21: mol_type = other DNA
tggtggaccggtactttagaa

SEQ ID NO: 34540 - DNA, 21 bp, synthetic construct
  source 1..21: mol_type = other DNA
tatgtgagattcgactccggg

SEQ ID NO: 34541 - DNA, 21 bp, synthetic construct
  source 1..21: mol_type = other DNA
tgcgataagacatgttcccct

SEQ ID NO: 34542 - DNA, 21 bp, synthetic construct
  source 1..21: mol_type = other DNA
tattttatgggtatcccagct

SEQ ID NO: 34543 - DNA, 21 bp, synthetic construct
  source 1..21: mol_type = other DNA
tatagtcggaataacgtcaat

SEQ ID NO: 34544 - DNA, 21 bp, synthetic construct
  source 1..21: mol_type = other DNA
tactggtcaggcacgagtagc

SEQ ID NO: 34545 - DNA, 21 bp, synthetic construct
  source 1..21: mol_type = other DNA
tacgcaaggcagaatttaaac

SEQ ID NO: 34546 - DNA, 21 bp, synthetic construct
  source 1..21: mol_type = other DNA
tatgcgcgtttatcgatcaat

SEQ ID NO: 34547 - DNA, 21 bp, synthetic construct
  source 1..21: mol_type = other DNA
tgccgcgaggggacaagagca

SEQ ID NO: 34548 - DNA, 21 bp, synthetic construct
  source 1..21: mol_type = other DNA
gatcggcgcgggtgctgtgca

SEQ ID NO: 34549 - DNA, 21 bp, synthetic construct
  source 1..21: mol_type = other DNA
tactggagcgcgaagctggat

SEQ ID NO: 34550 - DNA, 21 bp, synthetic construct
  source 1..21: mol_type = other DNA
agggaagaatttactgcttgg

SEQ ID NO: 34551 - DNA, 21 bp, synthetic construct
  source 1..21: mol_type = other DNA
ttcagtcgcatgaatacgaac

SEQ ID NO: 34552 - DNA, 21 bp, synthetic construct
  source 1..21: mol_type = other DNA
ggttgtgttgtgaaacccgaa

SEQ ID NO: 34553 - DNA, 21 bp, synthetic construct
  source 1..21: mol_type = other DNA
acccggtgtgtgggcgagata

SEQ ID NO: 34554 - DNA, 21 bp, synthetic construct
  source 1..21: mol_type = other DNA
tgctcgaaaccaacaccctcg

SEQ ID NO: 34555 - DNA, 21 bp, synthetic construct
  source 1..21: mol_type = other DNA
tgtggcggtataaagccgcct

SEQ ID NO: 34556 - DNA, 21 bp, synthetic construct
  source 1..21: mol_type = other DNA
ggccatgggaccaagtgtggc

SEQ ID NO: 34557 - DNA, 21 bp, synthetic construct
  source 1..21: mol_type = other DNA
tgtaaaatggacggcacgggt

SEQ ID NO: 34558 - DNA, 21 bp, synthetic construct
  source 1..21: mol_type = other DNA
aaagacgactttgtagtatgg

SEQ ID NO: 34559 - DNA, 21 bp, synthetic construct
  source 1..21: mol_type = other DNA
agcgacggtcacagcaagtgg

SEQ ID NO: 34560 - DNA, 21 bp, synthetic construct
  source 1..21: mol_type = other DNA
ggctcaggcacaaagtgcggg

SEQ ID NO: 34561 - DNA, 21 bp, synthetic construct
  source 1..21: mol_type = other DNA
aagaatggaacctcgtcatgg

SEQ ID NO: 34562 - DNA, 21 bp, synthetic construct
  source 1..21: mol_type = other DNA
ttctccagagctaactataac

SEQ ID NO: 34563 - DNA, 21 bp, synthetic construct
  source 1..21: mol_type = other DNA
tatttgaaaagtcagtactac

SEQ ID NO: 34564 - DNA, 21 bp, synthetic construct
  source 1..21: mol_type = other DNA
tgtgcagatagaaaacagggc

SEQ ID NO: 34565 - DNA, 21 bp, synthetic construct
  source 1..21: mol_type = other DNA
aagagcgactatgctacctat

SEQ ID NO: 34566 - DNA, 21 bp, synthetic construct
  source 1..21: mol_type = other DNA
aaagatgactacaatacgtat

SEQ ID NO: 34567 - DNA, 21 bp, synthetic construct
  source 1..21: mol_type = other DNA
tactataccggtagggccgat

SEQ ID NO: 34568 - DNA, 21 bp, synthetic construct
  source 1..21: mol_type = other DNA
gatggttacagtcgtgagtgg

SEQ ID NO: 34569 - DNA, 21 bp, synthetic construct
  source 1..21: mol_type = other DNA
tattggactggtaccgcgtca

SEQ ID NO: 34570 - DNA, 21 bp, synthetic construct
  source 1..21: mol_type = other DNA
acagacggcactgttaaatgc

SEQ ID NO: 34571 - DNA, 21 bp, synthetic construct
  source 1..21: mol_type = other DNA
agagaggattggtcgacgtat

SEQ ID NO: 34572 - DNA, 21 bp, synthetic construct
  source 1..21: mol_type = other DNA
actagtgactatatgagcttt

SEQ ID NO: 34573 - DNA, 21 bp, synthetic construct
  source 1..21: mol_type = other DNA
tccgatgggacatcaaagtgg

SEQ ID NO: 34574 - DNA, 21 bp, synthetic construct
  source 1..21: mol_type = other DNA
tattctcgacaaaacaacaat

SEQ ID NO: 34575 - DNA, 21 bp, synthetic construct
  source 1..21: mol_type = other DNA
tattcaagggctaatcaaaat

SEQ ID NO: 34576 - DNA, 21 bp, synthetic construct
  source 1..21: mol_type = other DNA
atcactagttttaacggtatc

SEQ ID NO: 34577 - DNA, 21 bp, synthetic construct
  source 1..21: mol_type = other DNA
tactcatcgagcaacggagtg

SEQ ID NO: 34578 - DNA, 21 bp, synthetic construct
  source 1..21: mol_type = other DNA
tatcgcagcacaaatggagtg

SEQ ID NO: 34579 - DNA, 21 bp, synthetic construct
  source 1..21: mol_type = other DNA
tgcaaaccaagccccttatct

SEQ ID NO: 34580 - DNA, 21 bp, synthetic construct
  source 1..21: mol_type = other DNA
tactttgctggtaagccagat

SEQ ID NO: 34581 - DNA, 21 bp, synthetic construct
  source 1..21: mol_type = other DNA
tatttccaagggcagcacgaa

SEQ ID NO: 34582 - DNA, 21 bp, synthetic construct
  source 1..21: mol_type = other DNA
tggttgaaaagtcagggcaat

SEQ ID NO: 34583 - DNA, 21 bp, synthetic construct
  source 1..21: mol_type = other DNA
tgcaaactccaaccaaagccg

SEQ ID NO: 34584 - DNA, 21 bp, synthetic construct
  source 1..21: mol_type = other DNA
atgtgggacggcactttcgca

SEQ ID NO: 34585 - DNA, 21 bp, synthetic construct
  source 1..21: mol_type = other DNA
acgtcagattatgaatcttac

SEQ ID NO: 34586 - DNA, 21 bp, synthetic construct
  source 1..21: mol_type = other DNA
tgcaaaccccagactcctact

SEQ ID NO: 34587 - DNA, 21 bp, synthetic construct
  source 1..21: mol_type = other DNA
tattctcgaattaatcaaaat

SEQ ID NO: 34588 - DNA, 21 bp, synthetic construct
  source 1..21: mol_type = other DNA
tatttcacagggctcgtggcg

SEQ ID NO: 34589 - DNA, 21 bp, synthetic construct
  source 1..21: mol_type = other DNA
tgtaagccgcagtggccgagt

SEQ ID NO: 34590 - DNA, 21 bp, synthetic construct
  source 1..21: mol_type = other DNA
gaattatcatccatcaaatgg

SEQ ID NO: 34591 - DNA, 21 bp, synthetic construct
  source 1..21: mol_type = other DNA
tattccagacacaatctaaac

SEQ ID NO: 34592 - DNA, 21 bp, synthetic construct
  source 1..21: mol_type = other DNA
gggtccgagtttgatcactgg

SEQ ID NO: 34593 - DNA, 21 bp, synthetic construct
  source 1..21: mol_type = other DNA
aaatacgcccgttcgagcgaa

SEQ ID NO: 34594 - DNA, 21 bp, synthetic construct
  source 1..21: mol_type = other DNA
tactggagtggccaagtttca

SEQ ID NO: 34595 - DNA, 21 bp, synthetic construct
  source 1..21: mol_type = other DNA
ttcgagtccgataatggtgtg

SEQ ID NO: 34596 - DNA, 21 bp, synthetic construct
  source 1..21: mol_type = other DNA
aagaatgattataatacctgg

SEQ ID NO: 34597 - DNA, 21 bp, synthetic construct
  source 1..21: mol_type = other DNA
agcccagggtatccaagcttt

SEQ ID NO: 34598 - DNA, 21 bp, synthetic construct
  source 1..21: mol_type = other DNA
tattggacaggaaccttagaa

SEQ ID NO: 34599 - DNA, 21 bp, synthetic construct
  source 1..21: mol_type = other DNA
tggttcagtggtattagtgaa

SEQ ID NO: 34600 - DNA, 21 bp, synthetic construct
  source 1..21: mol_type = other DNA
tgttcgaaggagaaccgcgag

SEQ ID NO: 34601 - DNA, 21 bp, synthetic construct
  source 1..21: mol_type = other DNA
cttccggacagcgtacgctgg

SEQ ID NO: 34602 - DNA, 21 bp, synthetic construct
  source 1..21: mol_type = other DNA
ttcttcacgggaagaacggat

SEQ ID NO: 34603 - DNA, 21 bp, synthetic construct
  source 1..21: mol_type = other DNA
tgtaagatgaactgcatggga

SEQ ID NO: 34604 - DNA, 21 bp, synthetic construct
  source 1..21: mol_type = other DNA
cgtgatgagttcacactttgg

SEQ ID NO: 34605 - DNA, 21 bp, synthetic construct
  source 1..21: mol_type = other DNA
tgtaaatcattaaagactgag

SEQ ID NO: 34606 - DNA, 21 bp, synthetic construct
  source 1..21: mol_type = other DNA
tgcaataaacctatggatgca

SEQ ID NO: 34607 - DNA, 21 bp, synthetic construct
  source 1..21: mol_type = other DNA
aagcaaaacgcgacagggtgt

SEQ ID NO: 34608 - DNA, 21 bp, synthetic construct
  source 1..21: mol_type = other DNA
cagcacaaactgcaaccgctt

SEQ ID NO: 34609 - DNA, 21 bp, synthetic construct
  source 1..21: mol_type = other DNA
tgcttacccaggtgtgtcgcc

SEQ ID NO: 34610 - DNA, 21 bp, synthetic construct
  source 1..21: mol_type = other DNA
cgcgatgaatatcagacatgg

SEQ ID NO: 34611 - DNA, 21 bp, synthetic construct
  source 1..21: mol_type = other DNA
ggctgtaagccccagatggga

SEQ ID NO: 34612 - DNA, 21 bp, synthetic construct
  source 1..21: mol_type = other DNA
ttgcaccgtctaacagaagga

SEQ ID NO: 34613 - DNA, 21 bp, synthetic construct
  source 1..21: mol_type = other DNA
ttcgacggttcgtgcaaggct

SEQ ID NO: 34614 - DNA, 21 bp, synthetic construct
  source 1..21: mol_type = other DNA
tactacacggggactatagat

SEQ ID NO: 34615 - DNA, 21 bp, synthetic construct
  source 1..21: mol_type = other DNA
tgcaaaattccatctaaggaa

SEQ ID NO: 34616 - DNA, 21 bp, synthetic construct
  source 1..21: mol_type = other DNA
attagcctcacacaaagtttt

SEQ ID NO: 34617 - DNA, 21 bp, synthetic construct
  source 1..21: mol_type = other DNA
tgtctccctttgtgtgggcct

SEQ ID NO: 34618 - DNA, 21 bp, synthetic construct
  source 1..21: mol_type = other DNA
gatgaaaatgcatttccctat

SEQ ID NO: 34619 - DNA, 21 bp, synthetic construct
  source 1..21: mol_type = other DNA
tactggtcagaagtgaaagag

SEQ ID NO: 34620 - DNA, 21 bp, synthetic construct
  source 1..21: mol_type = other DNA
ctgatgaagagttgccttcca

SEQ ID NO: 34621 - DNA, 21 bp, synthetic construct
  source 1..21: mol_type = other DNA
tgccaagacgacaagaaggga

SEQ ID NO: 34622 - DNA, 21 bp, synthetic construct
  source 1..21: mol_type = other DNA
atccccgaaagatgctgtaag

SEQ ID NO: 34623 - DNA, 21 bp, synthetic construct
  source 1..21: mol_type = other DNA
ttttttacaggccgcacagac

SEQ ID NO: 34624 - DNA, 21 bp, synthetic construct
  source 1..21: mol_type = other DNA
cgcgacgactggagcacctgg

SEQ ID NO: 34625 - DNA, 21 bp, synthetic construct
  source 1..21: mol_type = other DNA
tattttgcgggtaagccagat

SEQ ID NO: 34626 - DNA, 21 bp, synthetic construct
  source 1..21: mol_type = other DNA
caagactctaccaacggcaga

SEQ ID NO: 34627 - DNA, 21 bp, synthetic construct
  source 1..21: mol_type = other DNA
tgcggtggtggaaaagcaccg

SEQ ID NO: 34628 - DNA, 21 bp, synthetic construct
  source 1..21: mol_type = other DNA
tatactaaactcgatatgaat

SEQ ID NO: 34629 - DNA, 21 bp, synthetic construct
  source 1..21: mol_type = other DNA
tgtgcaaagccgatgacagca

SEQ ID NO: 34630 - DNA, 21 bp, synthetic construct
  source 1..21: mol_type = other DNA
ggtggcggctggacgatggga

SEQ ID NO: 34631 - DNA, 21 bp, synthetic construct
  source 1..21: mol_type = other DNA
tacgcaaagattgggttcaac

SEQ ID NO: 34632 - DNA, 21 bp, synthetic construct
  source 1..21: mol_type = other DNA
tgcaatcgccctatgaccgcg

SEQ ID NO: 34633 - DNA, 21 bp, synthetic construct
  source 1..21: mol_type = other DNA
aaagcgagcaatgaggcatgc

SEQ ID NO: 34634 - DNA, 21 bp, synthetic construct
  source 1..21: mol_type = other DNA
ttcgcaaagagtaaggctaac

SEQ ID NO: 34635 - DNA, 21 bp, synthetic construct
  source 1..21: mol_type = other DNA
ctggtcaagagtcagccgtgt

SEQ ID NO: 34636 - DNA, 21 bp, synthetic construct
  source 1..21: mol_type = other DNA
gtcgtcgattacatgtcccac

SEQ ID NO: 34637 - DNA, 21 bp, synthetic construct
  source 1..21: mol_type = other DNA
tggaacccgatgtgcaaggcg

SEQ ID NO: 34638 - DNA, 21 bp, synthetic construct
  source 1..21: mol_type = other DNA
tgtagatcgggtgcggcttta

SEQ ID NO: 34639 - DNA, 21 bp, synthetic construct
  source 1..21: mol_type = other DNA
tgcggtaaggctcactctagt

SEQ ID NO: 34640 - DNA, 21 bp, synthetic construct
  source 1..21: mol_type = other DNA
tgcaacaagcctatgggcgcg

SEQ ID NO: 34641 - DNA, 21 bp, synthetic construct
  source 1..21: mol_type = other DNA
tgggttaaaagtcaaccactg

SEQ ID NO: 34642 - DNA, 21 bp, synthetic construct
  source 1..21: mol_type = other DNA
gttccagaaggatgccacggt

SEQ ID NO: 34643 - DNA, 21 bp, synthetic construct
  source 1..21: mol_type = other DNA
tgcttgcgaacagatattgct

SEQ ID NO: 34644 - DNA, 21 bp, synthetic construct
  source 1..21: mol_type = other DNA
tattttgcaggccgtaatgac

SEQ ID NO: 34645 - DNA, 21 bp, synthetic construct
  source 1..21: mol_type = other DNA
atgacgggtaaatcatgcctt

SEQ ID NO: 34646 - DNA, 21 bp, synthetic construct
  source 1..21: mol_type = other DNA
ttcgcaaagagtggttggaat

SEQ ID NO: 34647 - DNA, 21 bp, synthetic construct
  source 1..21: mol_type = other DNA
tactggtccggtcaggtggag

SEQ ID NO: 34648 - DNA, 21 bp, synthetic construct
  source 1..21: mol_type = other DNA
tttatttcgacgaatggaagg

SEQ ID NO: 34649 - DNA, 21 bp, synthetic construct
  source 1..21: mol_type = other DNA
gacatgcaggaccgcagttgg

SEQ ID NO: 34650 - DNA, 21 bp, synthetic construct
  source 1..21: mol_type = other DNA
atggatggaagtagtaagtgg

SEQ ID NO: 34651 - DNA, 21 bp, synthetic construct
  source 1..21: mol_type = other DNA
tatgacccagggtgcaaagag

SEQ ID NO: 34652 - DNA, 21 bp, synthetic construct
  source 1..21: mol_type = other DNA
aaggatagttaccatattttc

SEQ ID NO: 34653 - DNA, 21 bp, synthetic construct
  source 1..21: mol_type = other DNA
acagcagggatgaaatgcatt

SEQ ID NO: 34654 - DNA, 21 bp, synthetic construct
  source 1..21: mol_type = other DNA
tctcaggaaacttgtaagttc

SEQ ID NO: 34655 - DNA, 21 bp, synthetic construct
  source 1..21: mol_type = other DNA
agagagtcaggcgtcagttgg

SEQ ID NO: 34656 - DNA, 21 bp, synthetic construct
  source 1..21: mol_type = other DNA
atacccgagactcgctgcgct

SEQ ID NO: 34657 - DNA, 21 bp, synthetic construct
  source 1..21: mol_type = other DNA
tgtaccagtggaaccgggcat

SEQ ID NO: 34658 - DNA, 21 bp, synthetic construct
  source 1..21: mol_type = other DNA
tgcaagagtctcaaaacagaa

SEQ ID NO: 34659 - DNA, 21 bp, synthetic construct
  source 1..21: mol_type = other DNA
tatagtaaaacaaattacaat

SEQ ID NO: 34660 - DNA, 21 bp, synthetic construct
  source 1..21: mol_type = other DNA
tccacatccagcaatggggta

SEQ ID NO: 34661 - DNA, 21 bp, synthetic construct
  source 1..21: mol_type = other DNA
tgtgacggttcgtctaaggcg

SEQ ID NO: 34662 - DNA, 21 bp, synthetic construct
  source 1..21: mol_type = other DNA
gtcaaaaagtatggacccgac

SEQ ID NO: 34663 - DNA, 21 bp, synthetic construct
  source 1..21: mol_type = other DNA
tgtgcaccctaccagcacgag

SEQ ID NO: 34664 - DNA, 21 bp, synthetic construct
  source 1..21: mol_type = other DNA
tacaagagtcaacaagactgc

SEQ ID NO: 34665 - DNA, 21 bp, synthetic construct
  source 1..21: mol_type = other DNA
atcgggggaaagtgccccttt

SEQ ID NO: 34666 - DNA, 21 bp, synthetic construct
  source 1..21: mol_type = other DNA
tgtaacaagccgatgacctac

SEQ ID NO: 34667 - DNA, 21 bp, synthetic construct
  source 1..21: mol_type = other DNA
ttttccaaacttggctataat

SEQ ID NO: 34668 - DNA, 21 bp, synthetic construct
  source 1..21: mol_type = other DNA
agagacgaagcgtcggcatgg

SEQ ID NO: 34669 - DNA, 21 bp, synthetic construct
  source 1..21: mol_type = other DNA
tacacaccaatgtgtaaagca

SEQ ID NO: 34670 - DNA, 21 bp, synthetic construct
  source 1..21: mol_type = other DNA
tgcaacttaccgatgactgcc

SEQ ID NO: 34671 - DNA, 21 bp, synthetic construct
  source 1..21: mol_type = other DNA
agggatggagagtcatattgg

SEQ ID NO: 34672 - DNA, 21 bp, synthetic construct
  source 1..21: mol_type = other DNA
tggaccgaagggacacgatat

SEQ ID NO: 34673 - DNA, 21 bp, synthetic construct
  source 1..21: mol_type = other DNA
tatagcaaagggaacatgaat

SEQ ID NO: 34674 - DNA, 21 bp, synthetic construct
  source 1..21: mol_type = other DNA
acgaaggaaagcgtgccgtgt

SEQ ID NO: 34675 - DNA, 21 bp, synthetic construct
  source 1..21: mol_type = other DNA
acctctaccgacaacaaatgc

SEQ ID NO: 34676 - DNA, 21 bp, synthetic construct
  source 1..21: mol_type = other DNA
tgcgagactaaaaagccgagc

SEQ ID NO: 34677 - DNA, 21 bp, synthetic construct
  source 1..21: mol_type = other DNA
aatctcgagagtagagagtgg

SEQ ID NO: 34678 - DNA, 21 bp, synthetic construct
  source 1..21: mol_type = other DNA
caaaaacacgaggccgagtgc

SEQ ID NO: 34679 - DNA, 21 bp, synthetic construct
  source 1..21: mol_type = other DNA
tgtgcaaagtgtccccgtcct

SEQ ID NO: 34680 - DNA, 21 bp, synthetic construct
  source 1..21: mol_type = other DNA
gaggacggaacgagcaagtgg

SEQ ID NO: 34681 - DNA, 21 bp, synthetic construct
  source 1..21: mol_type = other DNA
tgtaacaagcctatgacgcct

SEQ ID NO: 34682 - DNA, 21 bp, synthetic construct
  source 1..21: mol_type = other DNA
aagaaggacatcacatgcgct

SEQ ID NO: 34683 - DNA, 21 bp, synthetic construct
  source 1..21: mol_type = other DNA
tactttgccggcaagactagt

SEQ ID NO: 34684 - DNA, 21 bp, synthetic construct
  source 1..21: mol_type = other DNA
ttgacaaaaccatgcctcacg

SEQ ID NO: 34685 - DNA, 21 bp, synthetic construct
  source 1..21: mol_type = other DNA
ttcttttccggtaaattggat

SEQ ID NO: 34686 - DNA, 21 bp, synthetic construct
  source 1..21: mol_type = other DNA
ttctctaagagcggtccaaac

SEQ ID NO: 34687 - DNA, 21 bp, synthetic construct
  source 1..21: mol_type = other DNA
tggacgcccaattgtaaagcg

SEQ ID NO: 34688 - DNA, 21 bp, synthetic construct
  source 1..21: mol_type = other DNA
gggaacggcgggagtccgtgt

SEQ ID NO: 34689 - DNA, 21 bp, synthetic construct
  source 1..21: mol_type = other DNA
tgtaataaaccgatgcaagca

SEQ ID NO: 34690 - DNA, 21 bp, synthetic construct
  source 1..21: mol_type = other DNA
tatgccaagtgcaactcgaat

SEQ ID NO: 34691 - DNA, 21 bp, synthetic construct
  source 1..21: mol_type = other DNA
gggagccctgggagccactgg

SEQ ID NO: 34692 - DNA, 21 bp, synthetic construct
  source 1..21: mol_type = other DNA
caccccagcaagtgccccccg

SEQ ID NO: 34693 - DNA, 21 bp, synthetic construct
  source 1..21: mol_type = other DNA
tactggggcggtataacggag

SEQ ID NO: 34694 - DNA, 21 bp, synthetic construct
  source 1..21: mol_type = other DNA
ttatgggatggaaccaacgcc

SEQ ID NO: 34695 - DNA, 21 bp, synthetic construct
  source 1..21: mol_type = other DNA
tgtaaacctagcaagttggag

SEQ ID NO: 34696 - DNA, 21 bp, synthetic construct
  source 1..21: mol_type = other DNA
tatagtcccggttgtaaggag

SEQ ID NO: 34697 - DNA, 21 bp, synthetic construct
  source 1..21: mol_type = other DNA
ggcgatgagtatatgcccttt

SEQ ID NO: 34698 - DNA, 21 bp, synthetic construct
  source 1..21: mol_type = other DNA
gatgacggtaggtcacggtat

SEQ ID NO: 34699 - DNA, 21 bp, synthetic construct
  source 1..21: mol_type = other DNA
tacagtagggcctcggatgac

SEQ ID NO: 34700 - DNA, 21 bp, synthetic construct
  source 1..21: mol_type = other DNA
agagagtacgattcttttcca

SEQ ID NO: 34701 - DNA, 21 bp, synthetic construct
  source 1..21: mol_type = other DNA
ggtggcagtagtagcacgtgg

SEQ ID NO: 34702 - DNA, 21 bp, synthetic construct
  source 1..21: mol_type = other DNA
agatcagcagatgctttccca

SEQ ID NO: 34703 - DNA, 21 bp, synthetic construct
  source 1..21: mol_type = other DNA
tatttttcgggtagggaagac

SEQ ID NO: 34704 - DNA, 21 bp, synthetic construct
  source 1..21: mol_type = other DNA
tgcaagccgccaatgtttgag

SEQ ID NO: 34705 - DNA, 21 bp, synthetic construct
  source 1..21: mol_type = other DNA
gtagaggcgagtcgcagttgg

SEQ ID NO: 34706 - DNA, 21 bp, synthetic construct
  source 1..21: mol_type = other DNA
ataaaaagcaacggcgattgc

SEQ ID NO: 34707 - DNA, 21 bp, synthetic construct
  source 1..21: mol_type = other DNA
tgcaaggataaaccacaggta

SEQ ID NO: 34708 - DNA, 21 bp, synthetic construct
  source 1..21: mol_type = other DNA
gatggttactctgggcgggat

SEQ ID NO: 34709 - DNA, 21 bp, synthetic construct
  source 1..21: mol_type = other DNA
atgacgggtagtagttgtctc

SEQ ID NO: 34710 - DNA, 21 bp, synthetic construct
  source 1..21: mol_type = other DNA
cgaggggaagacgcttatcca

SEQ ID NO: 34711 - DNA, 21 bp, synthetic construct
  source 1..21: mol_type = other DNA
tgtaaaccacccatggtctca

SEQ ID NO: 34712 - DNA, 21 bp, synthetic construct
  source 1..21: mol_type = other DNA
tacgcgaaactcgggtttaat

SEQ ID NO: 34713 - DNA, 21 bp, synthetic construct
  source 1..21: mol_type = other DNA
gtccccgagtgtatgaaaccc

SEQ ID NO: 34714 - DNA, 21 bp, synthetic construct
  source 1..21: mol_type = other DNA
ccggaaagtacaaatggggtc

SEQ ID NO: 34715 - DNA, 21 bp, synthetic construct
  source 1..21: mol_type = other DNA
atgcacgggacctcctgccta

SEQ ID NO: 34716 - DNA, 21 bp, synthetic construct
  source 1..21: mol_type = other DNA
tactggacgggtgagaaagag

SEQ ID NO: 34717 - DNA, 21 bp, synthetic construct
  source 1..21: mol_type = other DNA
tatggaaagggggaaacgtgt

SEQ ID NO: 34718 - DNA, 21 bp, synthetic construct
  source 1..21: mol_type = other DNA
ggaagtcctggtaatagttgg

SEQ ID NO: 34719 - DNA, 21 bp, synthetic construct
  source 1..21: mol_type = other DNA
tatagtcggactaaccacaat

SEQ ID NO: 34720 - DNA, 21 bp, synthetic construct
  source 1..21: mol_type = other DNA
tattttagtggcattcctgta

SEQ ID NO: 34721 - DNA, 21 bp, synthetic construct
  source 1..21: mol_type = other DNA
ttcttctctggacagcacgag

SEQ ID NO: 34722 - DNA, 21 bp, synthetic construct
  source 1..21: mol_type = other DNA
tatgccaggctcaataacaac

SEQ ID NO: 34723 - DNA, 21 bp, synthetic construct
  source 1..21: mol_type = other DNA
tgcggggcgctaagaatctcg

SEQ ID NO: 34724 - DNA, 21 bp, synthetic construct
  source 1..21: mol_type = other DNA
tgcaagccttgtccgcttaga

SEQ ID NO: 34725 - DNA, 21 bp, synthetic construct
  source 1..21: mol_type = other DNA
ttttcgaagacaggccctaac

SEQ ID NO: 34726 - DNA, 21 bp, synthetic construct
  source 1..21: mol_type = other DNA
tactttacagggtacacggaa

SEQ ID NO: 34727 - DNA, 21 bp, synthetic construct
  source 1..21: mol_type = other DNA
tactggagtggcactactagc

SEQ ID NO: 34728 - DNA, 21 bp, synthetic construct
  source 1..21: mol_type = other DNA
cgggaaggcagttcatattgg

SEQ ID NO: 34729 - DNA, 21 bp, synthetic construct
  source 1..21: mol_type = other DNA
tttttctcggggcgctacgac

SEQ ID NO: 34730 - DNA, 21 bp, synthetic construct
  source 1..21: mol_type = other DNA
tatgctcgtatcggagataac

SEQ ID NO: 34731 - DNA, 21 bp, synthetic construct
  source 1..21: mol_type = other DNA
tgtccatcaaaaacaggacac

SEQ ID NO: 34732 - DNA, 21 bp, synthetic construct
  source 1..21: mol_type = other DNA
tcaatgagcactaacggggtg

SEQ ID NO: 34733 - DNA, 21 bp, synthetic construct
  source 1..21: mol_type = other DNA
atgtacaatgattgctgcgtc

SEQ ID NO: 34734 - DNA, 21 bp, synthetic construct
  source 1..21: mol_type = other DNA
cggagtgagttcaggacgtat

SEQ ID NO: 34735 - DNA, 21 bp, synthetic construct
  source 1..21: mol_type = other DNA
acgtggacgggggagaacgct

SEQ ID NO: 34736 - DNA, 21 bp, synthetic construct
  source 1..21: mol_type = other DNA
ggtattgaaactagcaggtgg

SEQ ID NO: 34737 - DNA, 21 bp, synthetic construct
  source 1..21: mol_type = other DNA
tgtaataaaccaatgagcgct

SEQ ID NO: 34738 - DNA, 21 bp, synthetic construct
  source 1..21: mol_type = other DNA
tattatacgggcgtgagtcta

SEQ ID NO: 34739 - DNA, 21 bp, synthetic construct
  source 1..21: mol_type = other DNA
tgggtaaagtcccagccttta

SEQ ID NO: 34740 - DNA, 21 bp, synthetic construct
  source 1..21: mol_type = other DNA
tgtaaacccccaatggacgga

SEQ ID NO: 34741 - DNA, 21 bp, synthetic construct
  source 1..21: mol_type = other DNA
ccctgtaagccgcaacccatg

SEQ ID NO: 34742 - DNA, 21 bp, synthetic construct
  source 1..21: mol_type = other DNA
ctcctgtctgatcgcgtgtgg

SEQ ID NO: 34743 - DNA, 21 bp, synthetic construct
  source 1..21: mol_type = other DNA
tggactcagatgtgtaaggcg

SEQ ID NO: 34744 - DNA, 21 bp, synthetic construct
  source 1..21: mol_type = other DNA
tactggtcacacatcaaagac

SEQ ID NO: 34745 - DNA, 21 bp, synthetic construct
  source 1..21: mol_type = other DNA
accataggcggggcctgcata

SEQ ID NO: 34746 - DNA, 21 bp, synthetic construct
  source 1..21: mol_type = other DNA
atgactggaacttcttgtgcc

SEQ ID NO: 34747 - DNA, 21 bp, synthetic construct
  source 1..21: mol_type = other DNA
ttctttacaggcaaaatggat

SEQ ID NO: 34748 - DNA, 21 bp, synthetic construct
  source 1..21: mol_type = other DNA
cgcgagggaacgtcgctctgg

SEQ ID NO: 34749 - DNA, 21 bp, synthetic construct
  source 1..21: mol_type = other DNA
atttattcgacgaacggaatc

SEQ ID NO: 34750 - DNA, 21 bp, synthetic construct
  source 1..21: mol_type = other DNA
ggatctgagtttatgtcatac

SEQ ID NO: 34751 - DNA, 21 bp, synthetic construct
  source 1..21: mol_type = other DNA
cgagacgagttggtattccca

SEQ ID NO: 34752 - DNA, 21 bp, synthetic construct
  source 1..21: mol_type = other DNA
tactttacgggcatgatacaa

SEQ ID NO: 34753 - DNA, 21 bp, synthetic construct
  source 1..21: mol_type = other DNA
tatagccgccagaaccacaat

SEQ ID NO: 34754 - DNA, 21 bp, synthetic construct
  source 1..21: mol_type = other DNA
gtcgcgcagggctgcaaaccc

SEQ ID NO: 34755 - DNA, 21 bp, synthetic construct
  source 1..21: mol_type = other DNA
tatgccagacaaaatgtaaac

SEQ ID NO: 34756 - DNA, 21 bp, synthetic construct
  source 1..21: mol_type = other DNA
tactcacgtaacggttttaac

SEQ ID NO: 34757 - DNA, 21 bp, synthetic construct
  source 1..21: mol_type = other DNA
acccaggagagcaataaatgt

SEQ ID NO: 34758 - DNA, 21 bp, synthetic construct
  source 1..21: mol_type = other DNA
tgtgcgatcaccccctgcggt

SEQ ID NO: 34759 - DNA, 21 bp, synthetic construct
  source 1..21: mol_type = other DNA
agagattacgaagtataccct

SEQ ID NO: 34760 - DNA, 21 bp, synthetic construct
  source 1..21: mol_type = other DNA
tacgcaagaaacgggggtaat

SEQ ID NO: 34761 - DNA, 21 bp, synthetic construct
  source 1..21: mol_type = other DNA
tgcaccgtaaaaacgggtcac

SEQ ID NO: 34762 - DNA, 21 bp, synthetic construct
  source 1..21: mol_type = other DNA
agggatgcagtgtctagttgg

SEQ ID NO: 34763 - DNA, 21 bp, synthetic construct
  source 1..21: mol_type = other DNA
aggacatatacggaatttcca

SEQ ID NO: 34764 - DNA, 21 bp, synthetic construct
  source 1..21: mol_type = other DNA
aggactgaatttcattcgttt

SEQ ID NO: 34765 - DNA, 21 bp, synthetic construct
  source 1..21: mol_type = other DNA
ttcttttcaggaactagggcg

SEQ ID NO: 34766 - DNA, 21 bp, synthetic construct
  source 1..21: mol_type = other DNA
cgtactagagattcttatccg

SEQ ID NO: 34767 - DNA, 21 bp, synthetic construct
  source 1..21: mol_type = other DNA
tgtaacaaggccatgacggcc

SEQ ID NO: 34768 - DNA, 21 bp, synthetic construct
  source 1..21: mol_type = other DNA
cgcgacaacggcgtaagatgg

SEQ ID NO: 34769 - DNA, 21 bp, synthetic construct
  source 1..21: mol_type = other DNA
tatgcccgaaacggtgacaat

SEQ ID NO: 34770 - DNA, 21 bp, synthetic construct
  source 1..21: mol_type = other DNA
ttgtcatctacgaatggggtg

SEQ ID NO: 34771 - DNA, 21 bp, synthetic construct
  source 1..21: mol_type = other DNA
ctggctaaaagtggtcagaac

SEQ ID NO: 34772 - DNA, 21 bp, synthetic construct
  source 1..21: mol_type = other DNA
tgtaaacccggcacagttatg

SEQ ID NO: 34773 - DNA, 21 bp, synthetic construct
  source 1..21: mol_type = other DNA
gttctctctgatgtaaaatgg

SEQ ID NO: 34774 - DNA, 21 bp, synthetic construct
  source 1..21: mol_type = other DNA
tactcccgtcaaaactacaac

SEQ ID NO: 34775 - DNA, 21 bp, synthetic construct
  source 1..21: mol_type = other DNA
ttcaagaagatgaattacaat

SEQ ID NO: 34776 - DNA, 21 bp, synthetic construct
  source 1..21: mol_type = other DNA
tgcaaggccaacgcaccagac

SEQ ID NO: 34777 - DNA, 21 bp, synthetic construct
  source 1..21: mol_type = other DNA
tgtgatggttcgtggaaggcg

SEQ ID NO: 34778 - DNA, 21 bp, synthetic construct
  source 1..21: mol_type = other DNA
tgcgaaggaaaaaaagaagca

SEQ ID NO: 34779 - DNA, 21 bp, synthetic construct
  source 1..21: mol_type = other DNA
gcaggcgaatgggtcacttat

SEQ ID NO: 34780 - DNA, 21 bp, synthetic construct
  source 1..21: mol_type = other DNA
tatcacaagaacatgccgaac

SEQ ID NO: 34781 - DNA, 21 bp, synthetic construct
  source 1..21: mol_type = other DNA
aaaaacgaccacgttaagtgg

SEQ ID NO: 34782 - DNA, 21 bp, synthetic construct
  source 1..21: mol_type = other DNA
tactaccagggtattcgcgcg

SEQ ID NO: 34783 - DNA, 21 bp, synthetic construct
  source 1..21: mol_type = other DNA
tatagtcgccaagggggcaac

SEQ ID NO: 34784 - DNA, 21 bp, synthetic construct
  source 1..21: mol_type = other DNA
ttcgctcgcagcggggcgaac

SEQ ID NO: 34785 - DNA, 21 bp, synthetic construct
  source 1..21: mol_type = other DNA
aaacaagacagtggacagtgc

SEQ ID NO: 34786 - DNA, 21 bp, synthetic construct
  source 1..21: mol_type = other DNA
gttgacgaatttcgtcatttt

SEQ ID NO: 34787 - DNA, 21 bp, synthetic construct
  source 1..21: mol_type = other DNA
cacgagtcatctaatggtgtc

SEQ ID NO: 34788 - DNA, 21 bp, synthetic construct
  source 1..21: mol_type = other DNA
tacttcacaggtgagatttta

SEQ ID NO: 34789 - DNA, 21 bp, synthetic construct
  source 1..21: mol_type = other DNA
tcggacggatactctaaatgg

SEQ ID NO: 34790 - DNA, 21 bp, synthetic construct
  source 1..21: mol_type = other DNA
tacgtgatatcggatcgcaat

SEQ ID NO: 34791 - DNA, 21 bp, synthetic construct
  source 1..21: mol_type = other DNA
tacgttcggtacgatacgggg

SEQ ID NO: 34792 - DNA, 21 bp, synthetic construct
  source 1..21: mol_type = other DNA
tatagtcgtaatggacacaat

SEQ ID NO: 34793 - DNA, 21 bp, synthetic construct
  source 1..21: mol_type = other DNA
gaagaagactggtcgaagtgg

SEQ ID NO: 34794 - DNA, 21 bp, synthetic construct
  source 1..21: mol_type = other DNA
ggcagtggtacctcaacgtgg

SEQ ID NO: 34795 - DNA, 21 bp, synthetic construct
  source 1..21: mol_type = other DNA
tgtaatggggcaggtccgagt

SEQ ID NO: 34796 - DNA, 21 bp, synthetic construct
  source 1..21: mol_type = other DNA
aaagagggtacgagccgttgg

SEQ ID NO: 34797 - DNA, 21 bp, synthetic construct
  source 1..21: mol_type = other DNA
tataaatcaaatactacatgc

SEQ ID NO: 34798 - DNA, 21 bp, synthetic construct
  source 1..21: mol_type = other DNA
tatgcgcgcatgggcaataac

SEQ ID NO: 34799 - DNA, 21 bp, synthetic construct
  source 1..21: mol_type = other DNA
tatttcagcggaacggtaact

SEQ ID NO: 34800 - DNA, 21 bp, synthetic construct
  source 1..21: mol_type = other DNA
cacagccgcttaaacgaatca

SEQ ID NO: 34801 - DNA, 21 bp, synthetic construct
  source 1..21: mol_type = other DNA
tttgctagaatgaattgcaat

SEQ ID NO: 34802 - DNA, 21 bp, synthetic construct
  source 1..21: mol_type = other DNA
catgggtctgggaacttcgta

SEQ ID NO: 34803 - DNA, 21 bp, synthetic construct
  source 1..21: mol_type = other DNA
tatgagcatgggtgcaaggag

SEQ ID NO: 34804 - DNA, 21 bp, synthetic construct
  source 1..21: mol_type = other DNA
atcaccgagcaaaagaattgc

SEQ ID NO: 34805 - DNA, 21 bp, synthetic construct
  source 1..21: mol_type = other DNA
tgtaaaaaaggctgctttgaa

SEQ ID NO: 34806 - DNA, 21 bp, synthetic construct
  source 1..21: mol_type = other DNA
ttttttaccgggagaatggat

SEQ ID NO: 34807 - DNA, 21 bp, synthetic construct
  source 1..21: mol_type = other DNA
ggcggtgacggaagcacgtgg

SEQ ID NO: 34808 - DNA, 21 bp, synthetic construct
  source 1..21: mol_type = other DNA
tactcaagaaatgggcataac

SEQ ID NO: 34809 - DNA, 21 bp, synthetic construct
  source 1..21: mol_type = other DNA
tattattctgggatgagagat

SEQ ID NO: 34810 - DNA, 21 bp, synthetic construct
  source 1..21: mol_type = other DNA
cgtgatgaattccagacatat

SEQ ID NO: 34811 - DNA, 21 bp, synthetic construct
  source 1..21: mol_type = other DNA
cccggacctgagagaaagtgg

SEQ ID NO: 34812 - DNA, 21 bp, synthetic construct
  source 1..21: mol_type = other DNA
cgagaggaggtgagtagttgg

SEQ ID NO: 34813 - DNA, 21 bp, synthetic construct
  source 1..21: mol_type = other DNA
ctgcccaaaatgggttgcgct

SEQ ID NO: 34814 - DNA, 21 bp, synthetic construct
  source 1..21: mol_type = other DNA
tattggactggacgcgctgat

SEQ ID NO: 34815 - DNA, 21 bp, synthetic construct
  source 1..21: mol_type = other DNA
gtttgcaagccgtgcttgact

SEQ ID NO: 34816 - DNA, 21 bp, synthetic construct
  source 1..21: mol_type = other DNA
ggtagcgagggttctacatgg

SEQ ID NO: 34817 - DNA, 21 bp, synthetic construct
  source 1..21: mol_type = other DNA
ggaggaagcggtagttcgtgg

SEQ ID NO: 34818 - DNA, 21 bp, synthetic construct
  source 1..21: mol_type = other DNA
gtgggcggcacttgtaagtac

SEQ ID NO: 34819 - DNA, 21 bp, synthetic construct
  source 1..21: mol_type = other DNA
tatttcagcggtttagtttcg

SEQ ID NO: 34820 - DNA, 21 bp, synthetic construct
  source 1..21: mol_type = other DNA
accacagagggggttcggtgg

SEQ ID NO: 34821 - DNA, 21 bp, synthetic construct
  source 1..21: mol_type = other DNA
tatgtacgaaatgatgacaaa

SEQ ID NO: 34822 - DNA, 21 bp, synthetic construct
  source 1..21: mol_type = other DNA
ctagcacgttcaggaggtggc

SEQ ID NO: 34823 - DNA, 21 bp, synthetic construct
  source 1..21: mol_type = other DNA
tttgcacgcagcggcatgaat

SEQ ID NO: 34824 - DNA, 21 bp, synthetic construct
  source 1..21: mol_type = other DNA
atcgcgagtcgttgtccccat

SEQ ID NO: 34825 - DNA, 21 bp, synthetic construct
  source 1..21: mol_type = other DNA
ggcggggggacaaccaggtgg

SEQ ID NO: 34826 - DNA, 21 bp, synthetic construct
  source 1..21: mol_type = other DNA
tatgcccgcttaggtattaat

SEQ ID NO: 34827 - DNA, 21 bp, synthetic construct
  source 1..21: mol_type = other DNA
ggtcattgcggagcgaccgtt

SEQ ID NO: 34828 - DNA, 21 bp, synthetic construct
  source 1..21: mol_type = other DNA
gtcgaatccgaccatggacgc

SEQ ID NO: 34829 - DNA, 21 bp, synthetic construct
  source 1..21: mol_type = other DNA
tatgctcgaatgggcttcaat

SEQ ID NO: 34830 - DNA, 21 bp, synthetic construct
  source 1..21: mol_type = other DNA
gcctggtcgacgaatgggata

SEQ ID NO: 34831 - DNA, 21 bp, synthetic construct
  source 1..21: mol_type = other DNA
gggggaggagtcgtgcgttgg

SEQ ID NO: 34832 - DNA, 21 bp, synthetic construct
  source 1..21: mol_type = other DNA
ataaatagtaccaacggcgtg

SEQ ID NO: 34833 - DNA, 21 bp, synthetic construct
  source 1..21: mol_type = other DNA
tgtgcacctgtctaccgcgag

SEQ ID NO: 34834 - DNA, 21 bp, synthetic construct
  source 1..21: mol_type = other DNA
ttctggaccgggaaggtggag

SEQ ID NO: 34835 - DNA, 21 bp, synthetic construct
  source 1..21: mol_type = other DNA
tggcaatctactaatggcatc

SEQ ID NO: 34836 - DNA, 21 bp, synthetic construct
  source 1..21: mol_type = other DNA
gatggctcgtcaaggagttgg

SEQ ID NO: 34837 - DNA, 21 bp, synthetic construct
  source 1..21: mol_type = other DNA
actaagcagaatgggaattgc

SEQ ID NO: 34838 - DNA, 21 bp, synthetic construct
  source 1..21: mol_type = other DNA
cgtatggatagtgttgtttgg

SEQ ID NO: 34839 - DNA, 21 bp, synthetic construct
  source 1..21: mol_type = other DNA
ttcactcgcttgtcaattaac

SEQ ID NO: 34840 - DNA, 21 bp, synthetic construct
  source 1..21: mol_type = other DNA
ccctacagccgtagcattgag

SEQ ID NO: 34841 - DNA, 21 bp, synthetic construct
  source 1..21: mol_type = other DNA
agaaatgatggtgtgagatgg

SEQ ID NO: 34842 - DNA, 21 bp, synthetic construct
  source 1..21: mol_type = other DNA
tatagcagggtagggtcccat

SEQ ID NO: 34843 - DNA, 21 bp, synthetic construct
  source 1..21: mol_type = other DNA
ggcgttggtggctgcaagcca

SEQ ID NO: 34844 - DNA, 21 bp, synthetic construct
  source 1..21: mol_type = other DNA
tacgtaaggcacgatgtacgc

SEQ ID NO: 34845 - DNA, 21 bp, synthetic construct
  source 1..21: mol_type = other DNA
tatttccaaggagtggttgcg

SEQ ID NO: 34846 - DNA, 21 bp, synthetic construct
  source 1..21: mol_type = other DNA
tatagtcgaagtgggtataat

SEQ ID NO: 34847 - DNA, 21 bp, synthetic construct
  source 1..21: mol_type = other DNA
tacgagcccggttgcaagcac

SEQ ID NO: 34848 - DNA, 21 bp, synthetic construct
  source 1..21: mol_type = other DNA
tactttcaaggcattcaggca

SEQ ID NO: 34849 - DNA, 21 bp, synthetic construct
  source 1..21: mol_type = other DNA
tattcgcgacataacccaaat

SEQ ID NO: 34850 - DNA, 21 bp, synthetic construct
  source 1..21: mol_type = other DNA
tattcacgcaataatctgaat

SEQ ID NO: 34851 - DNA, 21 bp, synthetic construct
  source 1..21: mol_type = other DNA
aggagtgagtttacaggtttt

SEQ ID NO: 34852 - DNA, 21 bp, synthetic construct
  source 1..21: mol_type = other DNA
ccggcaccaggttgtatgaaa

SEQ ID NO: 34853 - DNA, 21 bp, synthetic construct
  source 1..21: mol_type = other DNA
ggcagcggtacatccgtctgg

SEQ ID NO: 34854 - DNA, 21 bp, synthetic construct
  source 1..21: mol_type = other DNA
tatcataaaagtcagagctac

SEQ ID NO: 34855 - DNA, 21 bp, synthetic construct
  source 1..21: mol_type = other DNA
ataaaaagtacgaatggaatc

SEQ ID NO: 34856 - DNA, 21 bp, synthetic construct
  source 1..21: mol_type = other DNA
gacttaagcagcaatagctgg

SEQ ID NO: 34857 - DNA, 21 bp, synthetic construct
  source 1..21: mol_type = other DNA
tgtacaagcagaacaggtcat

SEQ ID NO: 34858 - DNA, 21 bp, synthetic construct
  source 1..21: mol_type = other DNA
tattggagtggtcaacatgaa

SEQ ID NO: 34859 - DNA, 21 bp, synthetic construct
  source 1..21: mol_type = other DNA
ttcaaagctggcacttggaat

SEQ ID NO: 34860 - DNA, 21 bp, synthetic construct
  source 1..21: mol_type = other DNA
tattcgcgccataatcacaac

SEQ ID NO: 34861 - DNA, 21 bp, synthetic construct
  source 1..21: mol_type = other DNA
ttctgggctggtataagggag

SEQ ID NO: 34862 - DNA, 21 bp, synthetic construct
  source 1..21: mol_type = other DNA
tttgcgcgtagcgggttcaat

SEQ ID NO: 34863 - DNA, 21 bp, synthetic construct
  source 1..21: mol_type = other DNA
tattggaccggtcaggtcgaa

SEQ ID NO: 34864 - DNA, 21 bp, synthetic construct
  source 1..21: mol_type = other DNA
tactggagcggcacgcgtgca

SEQ ID NO: 34865 - DNA, 21 bp, synthetic construct
  source 1..21: mol_type = other DNA
tatggtactggaacttggtcc

SEQ ID NO: 34866 - DNA, 21 bp, synthetic construct
  source 1..21: mol_type = other DNA
agctggtcaagcaatggggtc

SEQ ID NO: 34867 - DNA, 21 bp, synthetic construct
  source 1..21: mol_type = other DNA
tttttctccgggatgagggat

SEQ ID NO: 34868 - DNA, 21 bp, synthetic construct
  source 1..21: mol_type = other DNA
tgcaaaacagaatgcgtagcg

SEQ ID NO: 34869 - DNA, 21 bp, synthetic construct
  source 1..21: mol_type = other DNA
tattcgagacacggatctaac

SEQ ID NO: 34870 - DNA, 21 bp, synthetic construct
  source 1..21: mol_type = other DNA
tacagcaggcagaatcaaaat

SEQ ID NO: 34871 - DNA, 21 bp, synthetic construct
  source 1..21: mol_type = other DNA
tgcacttcggaaacggggcat

SEQ ID NO: 34872 - DNA, 21 bp, synthetic construct
  source 1..21: mol_type = other DNA
tatagccgaaacggccaaaac

SEQ ID NO: 34873 - DNA, 21 bp, synthetic construct
  source 1..21: mol_type = other DNA
aaaggggattcaagagactgg

SEQ ID NO: 34874 - DNA, 21 bp, synthetic construct
  source 1..21: mol_type = other DNA
atgggtgattccagcaagtgt

SEQ ID NO: 34875 - DNA, 21 bp, synthetic construct
  source 1..21: mol_type = other DNA
tgtttgccaggatgtttgcct

SEQ ID NO: 34876 - DNA, 21 bp, synthetic construct
  source 1..21: mol_type = other DNA
ggtggggagtccgttagatgg

SEQ ID NO: 34877 - DNA, 21 bp, synthetic construct
  source 1..21: mol_type = other DNA
aggactagtactatgggtgtc

SEQ ID NO: 34878 - DNA, 21 bp, synthetic construct
  source 1..21: mol_type = other DNA
tgcaaggattcagcccgtcta

SEQ ID NO: 34879 - DNA, 21 bp, synthetic construct
  source 1..21: mol_type = other DNA
tatttttctggcctccgagaa

SEQ ID NO: 34880 - DNA, 21 bp, synthetic construct
  source 1..21: mol_type = other DNA
tatgtccgcagtggcccgatg

SEQ ID NO: 34881 - DNA, 21 bp, synthetic construct
  source 1..21: mol_type = other DNA
tatagcaggctagatgtacta

SEQ ID NO: 34882 - DNA, 21 bp, synthetic construct
  source 1..21: mol_type = other DNA
aggatggactccgcggcctgg

SEQ ID NO: 34883 - DNA, 21 bp, synthetic construct
  source 1..21: mol_type = other DNA
tattttacaggcatgcagagt

SEQ ID NO: 34884 - DNA, 21 bp, synthetic construct
  source 1..21: mol_type = other DNA
tttagccgcaccggcactaat

SEQ ID NO: 34885 - DNA, 21 bp, synthetic construct
  source 1..21: mol_type = other DNA
tacgtccgctcgatgaacact

SEQ ID NO: 34886 - DNA, 21 bp, synthetic construct
  source 1..21: mol_type = other DNA
ggttccagtacgtctcattgg

SEQ ID NO: 34887 - DNA, 21 bp, synthetic construct
  source 1..21: mol_type = other DNA
cgatcggaaactagcagctgg

SEQ ID NO: 34888 - DNA, 21 bp, synthetic construct
  source 1..21: mol_type = other DNA
tattcgagaacgaatcacaac

SEQ ID NO: 34889 - DNA, 21 bp, synthetic construct
  source 1..21: mol_type = other DNA
gtcctcagtagcaacgtatgg

SEQ ID NO: 34890 - DNA, 21 bp, synthetic construct
  source 1..21: mol_type = other DNA
tactctagactcgacaacctt

SEQ ID NO: 34891 - DNA, 21 bp, synthetic construct
  source 1..21: mol_type = other DNA
gccggtggttcccgcgactgg

SEQ ID NO: 34892 - DNA, 21 bp, synthetic construct
  source 1..21: mol_type = other DNA
tggacgcccatgtgtaaggga

SEQ ID NO: 34893 - DNA, 21 bp, synthetic construct
  source 1..21: mol_type = other DNA
agggatggaggaagctcttgg

SEQ ID NO: 34894 - DNA, 21 bp, synthetic construct
  source 1..21: mol_type = other DNA
cacgaaagtagcaacggagtt

SEQ ID NO: 34895 - DNA, 21 bp, synthetic construct
  source 1..21: mol_type = other DNA
tatgcaagacacggcttcaac

SEQ ID NO: 34896 - DNA, 21 bp, synthetic construct
  source 1..21: mol_type = other DNA
atgacaggtacctcatgtgtt

SEQ ID NO: 34897 - DNA, 21 bp, synthetic construct
  source 1..21: mol_type = other DNA
tttgccaaaagcggattcaac

SEQ ID NO: 34898 - DNA, 21 bp, synthetic construct
  source 1..21: mol_type = other DNA
tactaccacggcgtccgcgat

SEQ ID NO: 34899 - DNA, 21 bp, synthetic construct
  source 1..21: mol_type = other DNA
gtggaatctgtcaatggaatc

SEQ ID NO: 34900 - DNA, 21 bp, synthetic construct
  source 1..21: mol_type = other DNA
tactttcatggtatggtggaa

SEQ ID NO: 34901 - DNA, 21 bp, synthetic construct
  source 1..21: mol_type = other DNA
ggcgatgagagttcagtttgg

SEQ ID NO: 34902 - DNA, 21 bp, synthetic construct
  source 1..21: mol_type = other DNA
tacagtcgcgtcaaccaaaat

SEQ ID NO: 34903 - DNA, 21 bp, synthetic construct
  source 1..21: mol_type = other DNA
agagatgcggtgtccaggtgg

SEQ ID NO: 34904 - DNA, 21 bp, synthetic construct
  source 1..21: mol_type = other DNA
atagacgagtggaagggatgg

SEQ ID NO: 34905 - DNA, 21 bp, synthetic construct
  source 1..21: mol_type = other DNA
acccgatggggtgacaacgct

SEQ ID NO: 34906 - DNA, 21 bp, synthetic construct
  source 1..21: mol_type = other DNA
tattttagtgggatgaccagt

SEQ ID NO: 34907 - DNA, 21 bp, synthetic construct
  source 1..21: mol_type = other DNA
tacagcaaacataacacaaac

SEQ ID NO: 34908 - DNA, 21 bp, synthetic construct
  source 1..21: mol_type = other DNA
tactggagtggcatccataat

SEQ ID NO: 34909 - DNA, 21 bp, synthetic construct
  source 1..21: mol_type = other DNA
agacaggaaggagtgaggtgg

SEQ ID NO: 34910 - DNA, 21 bp, synthetic construct
  source 1..21: mol_type = other DNA
tactggcaaggcatgcgcgag

SEQ ID NO: 34911 - DNA, 21 bp, synthetic construct
  source 1..21: mol_type = other DNA
ccaggtagcacgaatggcgtc

SEQ ID NO: 34912 - DNA, 21 bp, synthetic construct
  source 1..21: mol_type = other DNA
ggcggggagacatccttgtgg

SEQ ID NO: 34913 - DNA, 21 bp, synthetic construct
  source 1..21: mol_type = other DNA
tgtaagccaagcccactagaa

SEQ ID NO: 34914 - DNA, 21 bp, synthetic construct
  source 1..21: mol_type = other DNA
ctccataagtccacctgtgac

SEQ ID NO: 34915 - DNA, 21 bp, synthetic construct
  source 1..21: mol_type = other DNA
tggttttccggtcagcgcgac

SEQ ID NO: 34916 - DNA, 21 bp, synthetic construct
  source 1..21: mol_type = other DNA
tacagcaaagggaattggaat

SEQ ID NO: 34917 - DNA, 21 bp, synthetic construct
  source 1..21: mol_type = other DNA
ttctccaagttaggatttaac

SEQ ID NO: 34918 - DNA, 21 bp, synthetic construct
  source 1..21: mol_type = other DNA
tattttgcgggagttcttagt

SEQ ID NO: 34919 - DNA, 21 bp, synthetic construct
  source 1..21: mol_type = other DNA
gggtgcggaacgaaaggtggc

SEQ ID NO: 34920 - DNA, 21 bp, synthetic construct
  source 1..21: mol_type = other DNA
tattggtcggggcaggtgagt

SEQ ID NO: 34921 - DNA, 21 bp, synthetic construct
  source 1..21: mol_type = other DNA
tactcgcgaaataactacaat

SEQ ID NO: 34922 - DNA, 21 bp, synthetic construct
  source 1..21: mol_type = other DNA
tgcaaggcgccggacaaggga

SEQ ID NO: 34923 - DNA, 21 bp, synthetic construct
  source 1..21: mol_type = other DNA
ttatggaatgggactccaagc

SEQ ID NO: 34924 - DNA, 21 bp, synthetic construct
  source 1..21: mol_type = other DNA
ggaggccccaccagtgcgtgg

SEQ ID NO: 34925 - DNA, 21 bp, synthetic construct
  source 1..21: mol_type = other DNA
aagaatggttatagtagctat

SEQ ID NO: 34926 - DNA, 21 bp, synthetic construct
  source 1..21: mol_type = other DNA
tactcgcgccagaaccagaac

SEQ ID NO: 34927 - DNA, 21 bp, synthetic construct
  source 1..21: mol_type = other DNA
cgcgacggcagctgcaaggct

SEQ ID NO: 34928 - DNA, 21 bp, synthetic construct
  source 1..21: mol_type = other DNA
gaccacaagggacaaattgct

SEQ ID NO: 34929 - DNA, 21 bp, synthetic construct
  source 1..21: mol_type = other DNA
aaaaacggtacaagtagttgg

SEQ ID NO: 34930 - DNA, 21 bp, synthetic construct
  source 1..21: mol_type = other DNA
gaaatggagtcatccatatgg

SEQ ID NO: 34931 - DNA, 21 bp, synthetic construct
  source 1..21: mol_type = other DNA
tattgggaggggacacgccac

SEQ ID NO: 34932 - DNA, 21 bp, synthetic construct
  source 1..21: mol_type = other DNA
ttggcgaagaatggcattaat

SEQ ID NO: 34933 - DNA, 21 bp, synthetic construct
  source 1..21: mol_type = other DNA
gatttaaagtcggtcaagtgg

SEQ ID NO: 34934 - DNA, 21 bp, synthetic construct
  source 1..21: mol_type = other DNA
gtgagcacgcattgcagcgca

SEQ ID NO: 34935 - DNA, 21 bp, synthetic construct
  source 1..21: mol_type = other DNA
tgtaaggataccaagacagta

SEQ ID NO: 34936 - DNA, 21 bp, synthetic construct
  source 1..21: mol_type = other DNA
tgctactcaaagactggacat

SEQ ID NO: 34937 - DNA, 21 bp, synthetic construct
  source 1..21: mol_type = other DNA
tattggtctagtgttagggat

SEQ ID NO: 34938 - DNA, 21 bp, synthetic construct
  source 1..21: mol_type = other DNA
aagaacgattatataacctat

SEQ ID NO: 34939 - DNA, 21 bp, synthetic construct
  source 1..21: mol_type = other DNA
actcactcctcaaacggagtt

SEQ ID NO: 34940 - DNA, 21 bp, synthetic construct
  source 1..21: mol_type = other DNA
tattcgagaacgaatgccaac

SEQ ID NO: 34941 - DNA, 21 bp, synthetic construct
  source 1..21: mol_type = other DNA
tacagccgtgggaacaacaac

SEQ ID NO: 34942 - DNA, 21 bp, synthetic construct
  source 1..21: mol_type = other DNA
ctttttaaagagtgtggagga

SEQ ID NO: 34943 - DNA, 21 bp, synthetic construct
  source 1..21: mol_type = other DNA
tacagtagaatgaatttcaac

SEQ ID NO: 34944 - DNA, 21 bp, synthetic construct
  source 1..21: mol_type = other DNA
tacagcaagcagggcaccaat

SEQ ID NO: 34945 - DNA, 21 bp, synthetic construct
  source 1..21: mol_type = other DNA
tttttctcaggaattgtcggt

SEQ ID NO: 34946 - DNA, 21 bp, synthetic construct
  source 1..21: mol_type = other DNA
tactttacagggtcaagaagt

SEQ ID NO: 34947 - DNA, 21 bp, synthetic construct
  source 1..21: mol_type = other DNA
tattatacagggaaatgtgaa

SEQ ID NO: 34948 - DNA, 21 bp, synthetic construct
  source 1..21: mol_type = other DNA
cattggtctaccaatgggata

SEQ ID NO: 34949 - DNA, 21 bp, synthetic construct
  source 1..21: mol_type = other DNA
cgagacggcggctcgagctgg

SEQ ID NO: 34950 - DNA, 21 bp, synthetic construct
  source 1..21: mol_type = other DNA
tactttcaaggaattcaagcc

SEQ ID NO: 34951 - DNA, 21 bp, synthetic construct
  source 1..21: mol_type = other DNA
tacagccgtcacgggttaaac

SEQ ID NO: 34952 - DNA, 21 bp, synthetic construct
  source 1..21: mol_type = other DNA
aaaaacggctactcctcttac

SEQ ID NO: 34953 - DNA, 21 bp, synthetic construct
  source 1..21: mol_type = other DNA
ttctggagcggtaagattgat

SEQ ID NO: 34954 - DNA, 21 bp, synthetic construct
  source 1..21: mol_type = other DNA
ggcagcgaattcgaccattgg

SEQ ID NO: 34955 - DNA, 21 bp, synthetic construct
  source 1..21: mol_type = other DNA
tatttcacgggaagccgttcg

SEQ ID NO: 34956 - DNA, 21 bp, synthetic construct
  source 1..21: mol_type = other DNA
attggtatgaaaggatgggac

SEQ ID NO: 34957 - DNA, 21 bp, synthetic construct
  source 1..21: mol_type = other DNA
gaaatggagtccgtgaggtgg

SEQ ID NO: 34958 - DNA, 21 bp, synthetic construct
  source 1..21: mol_type = other DNA
ggagcggccaccagcaaatgg

SEQ ID NO: 34959 - DNA, 21 bp, synthetic construct
  source 1..21: mol_type = other DNA
taccattcaacaaatggaata

SEQ ID NO: 34960 - DNA, 21 bp, synthetic construct
  source 1..21: mol_type = other DNA
cactggtcaagtaatggcgtg

SEQ ID NO: 34961 - DNA, 21 bp, synthetic construct
  source 1..21: mol_type = other DNA
aaagatgggttctctacctat

SEQ ID NO: 34962 - DNA, 21 bp, synthetic construct
  source 1..21: mol_type = other DNA
tgcgatgggtccgctaaagca

SEQ ID NO: 34963 - DNA, 21 bp, synthetic construct
  source 1..21: mol_type = other DNA
tattatagcggagtcaccgca

SEQ ID NO: 34964 - DNA, 21 bp, synthetic construct
  source 1..21: mol_type = other DNA
tgtaagaaatatgggggtgac

SEQ ID NO: 34965 - DNA, 21 bp, synthetic construct
  source 1..21: mol_type = other DNA
cgaggcgggcaaagtacttgg

SEQ ID NO: 34966 - DNA, 21 bp, synthetic construct
  source 1..21: mol_type = other DNA
ggtggcggcacctcgaagtgg

SEQ ID NO: 34967 - DNA, 21 bp, synthetic construct
  source 1..21: mol_type = other DNA
catgatagtagtaacggcgtt

SEQ ID NO: 34968 - DNA, 21 bp, synthetic construct
  source 1..21: mol_type = other DNA
ttcgctaagtcaggttttaat

SEQ ID NO: 34969 - DNA, 21 bp, synthetic construct
  source 1..21: mol_type = other DNA
tacagcaggaacaatctaaac

SEQ ID NO: 34970 - DNA, 21 bp, synthetic construct
  source 1..21: mol_type = other DNA
tttagccgtctcggcatgaat

SEQ ID NO: 34971 - DNA, 21 bp, synthetic construct
  source 1..21: mol_type = other DNA
acctgggacgggtatgatgct

SEQ ID NO: 34972 - DNA, 21 bp, synthetic construct
  source 1..21: mol_type = other DNA
tattcgcggggtaactacaat

SEQ ID NO: 34973 - DNA, 21 bp, synthetic construct
  source 1..21: mol_type = other DNA
atgagatccaccaatggggtt

SEQ ID NO: 34974 - DNA, 21 bp, synthetic construct
  source 1..21: mol_type = other DNA
tacgcacgaggtggcgtcaat

SEQ ID NO: 34975 - DNA, 21 bp, synthetic construct
  source 1..21: mol_type = other DNA
acgtactcgggagacccggcg

SEQ ID NO: 34976 - DNA, 21 bp, synthetic construct
  source 1..21: mol_type = other DNA
tgcaaaggaagcggtgagcag

SEQ ID NO: 34977 - DNA, 21 bp, synthetic construct
  source 1..21: mol_type = other DNA
cgcggagactcatcaaggtgg

SEQ ID NO: 34978 - DNA, 21 bp, synthetic construct
  source 1..21: mol_type = other DNA
ctatggtcaggagtaggcccc

SEQ ID NO: 34979 - DNA, 21 bp, synthetic construct
  source 1..21: mol_type = other DNA
atcggtgccttaggttgggat

SEQ ID NO: 34980 - DNA, 21 bp, synthetic construct
  source 1..21: mol_type = other DNA
tacgtccgttttgattcaggc

SEQ ID NO: 34981 - DNA, 21 bp, synthetic construct
  source 1..21: mol_type = other DNA
tattggcaggggacggtagcg

SEQ ID NO: 34982 - DNA, 21 bp, synthetic construct
  source 1..21: mol_type = other DNA
ggcatggaacacgtcagatgg

SEQ ID NO: 34983 - DNA, 21 bp, synthetic construct
  source 1..21: mol_type = other DNA
gggggcgagacctctgtttgg

SEQ ID NO: 34984 - DNA, 21 bp, synthetic construct
  source 1..21: mol_type = other DNA
ctatgggacggcacaagagca

SEQ ID NO: 34985 - DNA, 21 bp, synthetic construct
  source 1..21: mol_type = other DNA
ccatattcgcggtcgatagaa

SEQ ID NO: 34986 - DNA, 21 bp, synthetic construct
  source 1..21: mol_type = other DNA
tacagccggcatggggccaat

SEQ ID NO: 34987 - DNA, 21 bp, synthetic construct
  source 1..21: mol_type = other DNA
tttgctcggaatggcttcaac

SEQ ID NO: 34988 - DNA, 21 bp, synthetic construct
  source 1..21: mol_type = other DNA
tggactagttcgaacggagtg

SEQ ID NO: 34989 - DNA, 21 bp, synthetic construct
  source 1..21: mol_type = other DNA
caaggcaacgggttgtacaga

SEQ ID NO: 34990 - DNA, 21 bp, synthetic construct
  source 1..21: mol_type = other DNA
cgtgatgacttttcgccttac

SEQ ID NO: 34991 - DNA, 21 bp, synthetic construct
  source 1..21: mol_type = other DNA
tactacacgggccacccgaac

SEQ ID NO: 34992 - DNA, 21 bp, synthetic construct
  source 1..21: mol_type = other DNA
ggcggcagtggcagttcctgg

SEQ ID NO: 34993 - DNA, 21 bp, synthetic construct
  source 1..21: mol_type = other DNA
cgtgacgccgttagctcctgg

SEQ ID NO: 34994 - DNA, 21 bp, synthetic construct
  source 1..21: mol_type = other DNA
cgcgacgccgcgagttcgtgg

SEQ ID NO: 34995 - DNA, 21 bp, synthetic construct
  source 1..21: mol_type = other DNA
tattcgagactctccgctatt

SEQ ID NO: 34996 - DNA, 21 bp, synthetic construct
  source 1..21: mol_type = other DNA
tacttcagtggtcgctccctt

SEQ ID NO: 34997 - DNA, 21 bp, synthetic construct
  source 1..21: mol_type = other DNA
gatcataaagggcagatcgcc

SEQ ID NO: 34998 - DNA, 21 bp, synthetic construct
  source 1..21: mol_type = other DNA
ggttgcgacttcagacctgaa

SEQ ID NO: 34999 - DNA, 21 bp, synthetic construct
  source 1..21: mol_type = other DNA
cgaagcgagttcacgcctttc

SEQ ID NO: 35000 - DNA, 21 bp, synthetic construct
  source 1..21: mol_type = other DNA
tacagcaagaccaactgtaat

SEQ ID NO: 35001 - DNA, 21 bp, synthetic construct
  source 1..21: mol_type = other DNA
tttagcagaatgaacttaaac

SEQ ID NO: 35002 - DNA, 21 bp, synthetic construct
  source 1..21: mol_type = other DNA
acttggagctctaacggtgtc

SEQ ID NO: 35003 - DNA, 21 bp, synthetic construct
  source 1..21: mol_type = other DNA
agctacgatgggactgccgcc

SEQ ID NO: 35004 - DNA, 21 bp, synthetic construct
  source 1..21: mol_type = other DNA
cgggactcggataacggtatc

SEQ ID NO: 35005 - DNA, 21 bp, synthetic construct
  source 1..21: mol_type = other DNA
tattcgcgcgcgaatgggaat

SEQ ID NO: 35006 - DNA, 21 bp, synthetic construct
  source 1..21: mol_type = other DNA
tactggcatgggaaacccgat

SEQ ID NO: 35007 - DNA, 21 bp, synthetic construct
  source 1..21: mol_type = other DNA
ttccacagtacgaacgggatt

SEQ ID NO: 35008 - DNA, 21 bp, synthetic construct
  source 1..21: mol_type = other DNA
ctaagcaaggctaatttcaat

SEQ ID NO: 35009 - DNA, 21 bp, synthetic construct
  source 1..21: mol_type = other DNA
tatgatggcggaaaaccttgt

SEQ ID NO: 35010 - DNA, 21 bp, synthetic construct
  source 1..21: mol_type = other DNA
tatagtaggcaaggttacaat

SEQ ID NO: 35011 - DNA, 21 bp, synthetic construct
  source 1..21: mol_type = other DNA
ggctccgagaacgtccggtgg

SEQ ID NO: 35012 - DNA, 21 bp, synthetic construct
  source 1..21: mol_type = other DNA
tactggagtaaagtggctgat

SEQ ID NO: 35013 - DNA, 21 bp, synthetic construct
  source 1..21: mol_type = other DNA
gtcccggactacgtccgctat

SEQ ID NO: 35014 - DNA, 21 bp, synthetic construct
  source 1..21: mol_type = other DNA
cgtacctatgataccgtagtt

SEQ ID NO: 35015 - DNA, 21 bp, synthetic construct
  source 1..21: mol_type = other DNA
aaaaccgggaatgaaggctgc

SEQ ID NO: 35016 - DNA, 21 bp, synthetic construct
  source 1..21: mol_type = other DNA
aattgggctagaagcctggaa

SEQ ID NO: 35017 - DNA, 21 bp, synthetic construct
  source 1..21: mol_type = other DNA
gtttgcatgccgcaaaagcca

SEQ ID NO: 35018 - DNA, 21 bp, synthetic construct
  source 1..21: mol_type = other DNA
ctctatgacggagacgggccg

SEQ ID NO: 35019 - DNA, 21 bp, synthetic construct
  source 1..21: mol_type = other DNA
aaaaatggcacatctgcgtgg

SEQ ID NO: 35020 - DNA, 21 bp, synthetic construct
  source 1..21: mol_type = other DNA
cagaattcgacgaacggtcgt

SEQ ID NO: 35021 - DNA, 21 bp, synthetic construct
  source 1..21: mol_type = other DNA
cgtaacggagcctcatcgtgg

SEQ ID NO: 35022 - DNA, 21 bp, synthetic construct
  source 1..21: mol_type = other DNA
aggagcgaatttacgtccttt

SEQ ID NO: 35023 - DNA, 21 bp, synthetic construct
  source 1..21: mol_type = other DNA
tgcaaggtgcccaaaatgcct

SEQ ID NO: 35024 - DNA, 21 bp, synthetic construct
  source 1..21: mol_type = other DNA
aggacatacgacactgtggtg

SEQ ID NO: 35025 - DNA, 21 bp, synthetic construct
  source 1..21: mol_type = other DNA
tacagccgggcagggggtagt

SEQ ID NO: 35026 - DNA, 21 bp, synthetic construct
  source 1..21: mol_type = other DNA
cttatcagcggcgatgggcct

SEQ ID NO: 35027 - DNA, 21 bp, synthetic construct
  source 1..21: mol_type = other DNA
tatagcaggtctaacagtaac

SEQ ID NO: 35028 - DNA, 21 bp, synthetic construct
  source 1..21: mol_type = other DNA
agagatgaatttcgcagttat

SEQ ID NO: 35029 - DNA, 21 bp, synthetic construct
  source 1..21: mol_type = other DNA
tacgctagaggtaatttaaat

SEQ ID NO: 35030 - DNA, 21 bp, synthetic construct
  source 1..21: mol_type = other DNA
tggttctcgggtaggcatgcc

SEQ ID NO: 35031 - DNA, 21 bp, synthetic construct
  source 1..21: mol_type = other DNA
tatcaaagacagggttgggat

SEQ ID NO: 35032 - DNA, 21 bp, synthetic construct
  source 1..21: mol_type = other DNA
tattcgagaattgacaataat

SEQ ID NO: 35033 - DNA, 21 bp, synthetic construct
  source 1..21: mol_type = other DNA
ggtgttaatcaggtcaggtgg

SEQ ID NO: 35034 - DNA, 21 bp, synthetic construct
  source 1..21: mol_type = other DNA
cgtaacgaatttacagcctac

SEQ ID NO: 35035 - DNA, 21 bp, synthetic construct
  source 1..21: mol_type = other DNA
ggcagcggaacctccgcctgg

SEQ ID NO: 35036 - DNA, 21 bp, synthetic construct
  source 1..21: mol_type = other DNA
tgccgcgttgagaaacctcca

SEQ ID NO: 35037 - DNA, 21 bp, synthetic construct
  source 1..21: mol_type = other DNA
agaggagagggtgtgcgctgg

SEQ ID NO: 35038 - DNA, 21 bp, synthetic construct
  source 1..21: mol_type = other DNA
ggaagtgaacatgtgcgttgg

SEQ ID NO: 35039 - DNA, 21 bp, synthetic construct
  source 1..21: mol_type = other DNA
agaggggaattcagcacttgg

SEQ ID NO: 35040 - DNA, 21 bp, synthetic construct
  source 1..21: mol_type = other DNA
tactcgcggaccaacaataac

SEQ ID NO: 35041 - DNA, 21 bp, synthetic construct
  source 1..21: mol_type = other DNA
actagggaaggagatccacct

SEQ ID NO: 35042 - DNA, 21 bp, synthetic construct
  source 1..21: mol_type = other DNA
tattttagtggcgtcttgaca

SEQ ID NO: 35043 - DNA, 21 bp, synthetic construct
  source 1..21: mol_type = other DNA
gagatggctgcttacgattgg

SEQ ID NO: 35044 - DNA, 21 bp, synthetic construct
  source 1..21: mol_type = other DNA
aaggaggattacgtgacgtat

SEQ ID NO: 35045 - DNA, 21 bp, synthetic construct
  source 1..21: mol_type = other DNA
ggaggtgaaacaagcgtctgg

SEQ ID NO: 35046 - DNA, 21 bp, synthetic construct
  source 1..21: mol_type = other DNA
gccggggagtgggtaacgtac

SEQ ID NO: 35047 - DNA, 21 bp, synthetic construct
  source 1..21: mol_type = other DNA
ttctttgcagggatacgtgaa

SEQ ID NO: 35048 - DNA, 21 bp, synthetic construct
  source 1..21: mol_type = other DNA
tatttccatggagtgacggag

SEQ ID NO: 35049 - DNA, 21 bp, synthetic construct
  source 1..21: mol_type = other DNA
tcggatggtgtcagtgcgtgg

SEQ ID NO: 35050 - DNA, 21 bp, synthetic construct
  source 1..21: mol_type = other DNA
gatctagggtcatcggtgtgg

SEQ ID NO: 35051 - DNA, 21 bp, synthetic construct
  source 1..21: mol_type = other DNA
tactacagtggtgtcaagtac

SEQ ID NO: 35052 - DNA, 21 bp, synthetic construct
  source 1..21: mol_type = other DNA
cgcagcgagtacactgtttac

SEQ ID NO: 35053 - DNA, 21 bp, synthetic construct
  source 1..21: mol_type = other DNA
taccataggttgggcgagccg

SEQ ID NO: 35054 - DNA, 21 bp, synthetic construct
  source 1..21: mol_type = other DNA
tatgcacggggaaataacaac

SEQ ID NO: 35055 - DNA, 21 bp, synthetic construct
  source 1..21: mol_type = other DNA
ttttggcacggcgtaccggac

SEQ ID NO: 35056 - DNA, 21 bp, synthetic construct
  source 1..21: mol_type = other DNA
tgcacgacaaagactggtcat

SEQ ID NO: 35057 - DNA, 21 bp, synthetic construct
  source 1..21: mol_type = other DNA
aaggacgactatgtcccttgg

SEQ ID NO: 35058 - DNA, 21 bp, synthetic construct
  source 1..21: mol_type = other DNA
tattggacagggatgccagaa

SEQ ID NO: 35059 - DNA, 21 bp, synthetic construct
  source 1..21: mol_type = other DNA
ttgtggaagaccggacataac

SEQ ID NO: 35060 - DNA, 21 bp, synthetic construct
  source 1..21: mol_type = other DNA
tacagtaagtatggtaacaat

SEQ ID NO: 35061 - DNA, 21 bp, synthetic construct
  source 1..21: mol_type = other DNA
aggggtgaatttgtatcatgg

SEQ ID NO: 35062 - DNA, 21 bp, synthetic construct
  source 1..21: mol_type = other DNA
ggtggggctggaagccactgg

SEQ ID NO: 35063 - DNA, 21 bp, synthetic construct
  source 1..21: mol_type = other DNA
gttgaaccaggctgtaaagaa

SEQ ID NO: 35064 - DNA, 21 bp, synthetic construct
  source 1..21: mol_type = other DNA
aaggacggatcaagctattgg

SEQ ID NO: 35065 - DNA, 21 bp, synthetic construct
  source 1..21: mol_type = other DNA
agaggagattaccaggttttc

SEQ ID NO: 35066 - DNA, 21 bp, synthetic construct
  source 1..21: mol_type = other DNA
tatgcgaaggtcggctggaac

SEQ ID NO: 35067 - DNA, 21 bp, synthetic construct
  source 1..21: mol_type = other DNA
ttgcacaaatcaacttgcgat

SEQ ID NO: 35068 - DNA, 21 bp, synthetic construct
  source 1..21: mol_type = other DNA
agaaactttgacgcatacccc

SEQ ID NO: 35069 - DNA, 21 bp, synthetic construct
  source 1..21: mol_type = other DNA
tacagcagacataacatgaat

SEQ ID NO: 35070 - DNA, 21 bp, synthetic construct
  source 1..21: mol_type = other DNA
tttgcaaaatcgggatggaac

SEQ ID NO: 35071 - DNA, 21 bp, synthetic construct
  source 1..21: mol_type = other DNA
tatttttctgggatgcgcagc

SEQ ID NO: 35072 - DNA, 21 bp, synthetic construct
  source 1..21: mol_type = other DNA
tacgactcaacaaatgggata

SEQ ID NO: 35073 - DNA, 21 bp, synthetic construct
  source 1..21: mol_type = other DNA
tactggcagggtatgttggat

SEQ ID NO: 35074 - DNA, 21 bp, synthetic construct
  source 1..21: mol_type = other DNA
ggtggaggcactagtaagtgg

SEQ ID NO: 35075 - DNA, 21 bp, synthetic construct
  source 1..21: mol_type = other DNA
aaagacgagttccagacgtac

SEQ ID NO: 35076 - DNA, 21 bp, synthetic construct
  source 1..21: mol_type = other DNA
aggttagatcatgtgttccct

SEQ ID NO: 35077 - DNA, 21 bp, synthetic construct
  source 1..21: mol_type = other DNA
aaagatggtgttagtaaatgg

SEQ ID NO: 35078 - DNA, 21 bp, synthetic construct
  source 1..21: mol_type = other DNA
tactggagtggtcaacatgcc

SEQ ID NO: 35079 - DNA, 21 bp, synthetic construct
  source 1..21: mol_type = other DNA
ccgcatcctaagtgtccgttt

SEQ ID NO: 35080 - DNA, 21 bp, synthetic construct
  source 1..21: mol_type = other DNA
tactcccgtcaaggctataac

SEQ ID NO: 35081 - DNA, 21 bp, synthetic construct
  source 1..21: mol_type = other DNA
tacgccaggcatggcatgaac

SEQ ID NO: 35082 - DNA, 21 bp, synthetic construct
  source 1..21: mol_type = other DNA
tacgtaaggagtatgaacacg

SEQ ID NO: 35083 - DNA, 21 bp, synthetic construct
  source 1..21: mol_type = other DNA
ggttcgccaggctccgcctgg

SEQ ID NO: 35084 - DNA, 21 bp, synthetic construct
  source 1..21: mol_type = other DNA
agggatgagttcatgcattac

SEQ ID NO: 35085 - DNA, 21 bp, synthetic construct
  source 1..21: mol_type = other DNA
tacttttcaggaaccatcacg

SEQ ID NO: 35086 - DNA, 21 bp, synthetic construct
  source 1..21: mol_type = other DNA
agggaggacacgagttattgg

SEQ ID NO: 35087 - DNA, 21 bp, synthetic construct
  source 1..21: mol_type = other DNA
tactcaaaatacgggcttaac

SEQ ID NO: 35088 - DNA, 21 bp, synthetic construct
  source 1..21: mol_type = other DNA
ggaggcgagttcgttcactgg

SEQ ID NO: 35089 - DNA, 21 bp, synthetic construct
  source 1..21: mol_type = other DNA
taccacaggacagggaataac

SEQ ID NO: 35090 - DNA, 21 bp, synthetic construct
  source 1..21: mol_type = other DNA
tatagcagaaacaatgtaaac

SEQ ID NO: 35091 - DNA, 21 bp, synthetic construct
  source 1..21: mol_type = other DNA
gggtcggaattcataacgttc

SEQ ID NO: 35092 - DNA, 21 bp, synthetic construct
  source 1..21: mol_type = other DNA
ggcgaggagggagttcgctgg

SEQ ID NO: 35093 - DNA, 21 bp, synthetic construct
  source 1..21: mol_type = other DNA
tgcaattctaaaactgggcac

SEQ ID NO: 35094 - DNA, 21 bp, synthetic construct
  source 1..21: mol_type = other DNA
ttggctaggggaggctgggat

SEQ ID NO: 35095 - DNA, 21 bp, synthetic construct
  source 1..21: mol_type = other DNA
atagagtcctcacggtcgtgg

SEQ ID NO: 35096 - DNA, 21 bp, synthetic construct
  source 1..21: mol_type = other DNA
taccaccgaaattcagataac

SEQ ID NO: 35097 - DNA, 21 bp, synthetic construct
  source 1..21: mol_type = other DNA
tactacagcggcatgcgtgac

SEQ ID NO: 35098 - DNA, 21 bp, synthetic construct
  source 1..21: mol_type = other DNA
gaccttaatagtagaggctgg

SEQ ID NO: 35099 - DNA, 21 bp, synthetic construct
  source 1..21: mol_type = other DNA
cgtggggaaggcgtaaggtgg

SEQ ID NO: 35100 - DNA, 21 bp, synthetic construct
  source 1..21: mol_type = other DNA
cgcgatgctttcgtatcgtac

SEQ ID NO: 35101 - DNA, 21 bp, synthetic construct
  source 1..21: mol_type = other DNA
gatatgagcagcgttgcatgg

SEQ ID NO: 35102 - DNA, 21 bp, synthetic construct
  source 1..21: mol_type = other DNA
tattattcagggcagcgtgct

SEQ ID NO: 35103 - DNA, 21 bp, synthetic construct
  source 1..21: mol_type = other DNA
ggtgctggtacctcgcattgg

SEQ ID NO: 35104 - DNA, 21 bp, synthetic construct
  source 1..21: mol_type = other DNA
tatgtcaggtcgcaagacttt

SEQ ID NO: 35105 - DNA, 21 bp, synthetic construct
  source 1..21: mol_type = other DNA
aagaatgattacgctacgtgg

SEQ ID NO: 35106 - DNA, 21 bp, synthetic construct
  source 1..21: mol_type = other DNA
cgcgaatcaaccaacggcaga

SEQ ID NO: 35107 - DNA, 21 bp, synthetic construct
  source 1..21: mol_type = other DNA
agggaggagacaaggtactgg

SEQ ID NO: 35108 - DNA, 21 bp, synthetic construct
  source 1..21: mol_type = other DNA
tgtggaaagccaatgaccgct

SEQ ID NO: 35109 - DNA, 21 bp, synthetic construct
  source 1..21: mol_type = other DNA
tattacagcggaacccgggct

SEQ ID NO: 35110 - DNA, 21 bp, synthetic construct
  source 1..21: mol_type = other DNA
tacttttcggggaccattgtt

SEQ ID NO: 35111 - DNA, 21 bp, synthetic construct
  source 1..21: mol_type = other DNA
agttcaccaggagtaagatgg

SEQ ID NO: 35112 - DNA, 21 bp, synthetic construct
  source 1..21: mol_type = other DNA
tattatacgggatataaggaa

SEQ ID NO: 35113 - DNA, 21 bp, synthetic construct
  source 1..21: mol_type = other DNA
gtgatgtcagacaatggtata

SEQ ID NO: 35114 - DNA, 21 bp, synthetic construct
  source 1..21: mol_type = other DNA
aggtcagaatttacccccttt

SEQ ID NO: 35115 - DNA, 21 bp, synthetic construct
  source 1..21: mol_type = other DNA
cggggtgaatttaccgtatgg

SEQ ID NO: 35116 - DNA, 21 bp, synthetic construct
  source 1..21: mol_type = other DNA
tggtggtctgggtacgttgag

SEQ ID NO: 35117 - DNA, 21 bp, synthetic construct
  source 1..21: mol_type = other DNA
tactggcaaggtgtagtagat

SEQ ID NO: 35118 - DNA, 21 bp, synthetic construct
  source 1..21: mol_type = other DNA
gggggcgaatcagtcagatgg

SEQ ID NO: 35119 - DNA, 21 bp, synthetic construct
  source 1..21: mol_type = other DNA
tattggagtcatattaaggat

SEQ ID NO: 35120 - DNA, 21 bp, synthetic construct
  source 1..21: mol_type = other DNA
cggtccgagtaccacttccct

SEQ ID NO: 35121 - DNA, 21 bp, synthetic construct
  source 1..21: mol_type = other DNA
atgtgtaggccttgttcagaa

SEQ ID NO: 35122 - DNA, 21 bp, synthetic construct
  source 1..21: mol_type = other DNA
tactacagtggcgtaaaggtc

SEQ ID NO: 35123 - DNA, 21 bp, synthetic construct
  source 1..21: mol_type = other DNA
ggagtggagtcggtgcgatgg

SEQ ID NO: 35124 - DNA, 21 bp, synthetic construct
  source 1..21: mol_type = other DNA
tatgcgcgtcatggactgaat

SEQ ID NO: 35125 - DNA, 21 bp, synthetic construct
  source 1..21: mol_type = other DNA
tactcgagaaataatcacaat

SEQ ID NO: 35126 - DNA, 21 bp, synthetic construct
  source 1..21: mol_type = other DNA
tactatactggcatttctgag

SEQ ID NO: 35127 - DNA, 21 bp, synthetic construct
  source 1..21: mol_type = other DNA
cggatggaagctgtcaagtgg

SEQ ID NO: 35128 - DNA, 21 bp, synthetic construct
  source 1..21: mol_type = other DNA
gatttgaactcgcgtggttgg

SEQ ID NO: 35129 - DNA, 21 bp, synthetic construct
  source 1..21: mol_type = other DNA
tatataaaatcggatacgggg

SEQ ID NO: 35130 - DNA, 21 bp, synthetic construct
  source 1..21: mol_type = other DNA
tacagtagactggactccttc

SEQ ID NO: 35131 - DNA, 21 bp, synthetic construct
  source 1..21: mol_type = other DNA
tactccagatccaatcataac

SEQ ID NO: 35132 - DNA, 21 bp, synthetic construct
  source 1..21: mol_type = other DNA
aaatgcgggaaacaagaggga

SEQ ID NO: 35133 - DNA, 21 bp, synthetic construct
  source 1..21: mol_type = other DNA
tatttttctgcggttagggca

SEQ ID NO: 35134 - DNA, 21 bp, synthetic construct
  source 1..21: mol_type = other DNA
tacagcagatacaacgttaat

SEQ ID NO: 35135 - DNA, 21 bp, synthetic construct
  source 1..21: mol_type = other DNA
atcgatgaatggaaagggtgg

SEQ ID NO: 35136 - DNA, 21 bp, synthetic construct
  source 1..21: mol_type = other DNA
gctatgctcagttcaacatgg

SEQ ID NO: 35137 - DNA, 21 bp, synthetic construct
  source 1..21: mol_type = other DNA
aagacggagtttacgacctat

SEQ ID NO: 35138 - DNA, 21 bp, synthetic construct
  source 1..21: mol_type = other DNA
tgtggaggcggcaaaacgccc

SEQ ID NO: 35139 - DNA, 21 bp, synthetic construct
  source 1..21: mol_type = other DNA
tgcagacctcagatggcgagc

SEQ ID NO: 35140 - DNA, 21 bp, synthetic construct
  source 1..21: mol_type = other DNA
ggagatgaatgggagcacttc

SEQ ID NO: 35141 - DNA, 21 bp, synthetic construct
  source 1..21: mol_type = other DNA
aggggaggggaccgcgcgtgg

SEQ ID NO: 35142 - DNA, 21 bp, synthetic construct
  source 1..21: mol_type = other DNA
acttggacgggcatgaatgct

SEQ ID NO: 35143 - DNA, 21 bp, synthetic construct
  source 1..21: mol_type = other DNA
tactggagcggcttacatgcg

SEQ ID NO: 35144 - DNA, 21 bp, synthetic construct
  source 1..21: mol_type = other DNA
tactacagcggcgtaaggaac

SEQ ID NO: 35145 - DNA, 21 bp, synthetic construct
  source 1..21: mol_type = other DNA
ttggctagaggagggttcgac

SEQ ID NO: 35146 - DNA, 21 bp, synthetic construct
  source 1..21: mol_type = other DNA
aagttggaaagcgttgtctgg

SEQ ID NO: 35147 - DNA, 21 bp, synthetic construct
  source 1..21: mol_type = other DNA
ttatggacaggagttgggcct

SEQ ID NO: 35148 - DNA, 21 bp, synthetic construct
  source 1..21: mol_type = other DNA
tatagcagagggaatcataat

SEQ ID NO: 35149 - DNA, 21 bp, synthetic construct
  source 1..21: mol_type = other DNA
cgcggtgactcatctaggtgg

SEQ ID NO: 35150 - DNA, 21 bp, synthetic construct
  source 1..21: mol_type = other DNA
atgtgggacggaacatatgcg

SEQ ID NO: 35151 - DNA, 21 bp, synthetic construct
  source 1..21: mol_type = other DNA
ggcgacggcacaaagtgcggg

SEQ ID NO: 35152 - DNA, 21 bp, synthetic construct
  source 1..21: mol_type = other DNA
tactggactgggttacacgaa

SEQ ID NO: 35153 - DNA, 21 bp, synthetic construct
  source 1..21: mol_type = other DNA
tttagtcgtctgaacgggaat

SEQ ID NO: 35154 - DNA, 21 bp, synthetic construct
  source 1..21: mol_type = other DNA
cgagataacggtgtccgctgg

SEQ ID NO: 35155 - DNA, 21 bp, synthetic construct
  source 1..21: mol_type = other DNA
tatttccaggggatccaagct

SEQ ID NO: 35156 - DNA, 21 bp, synthetic construct
  source 1..21: mol_type = other DNA
agggacaatggagtgaggtgg

SEQ ID NO: 35157 - DNA, 21 bp, synthetic construct
  source 1..21: mol_type = other DNA
gacggatattcaagggaatgg

SEQ ID NO: 35158 - DNA, 21 bp, synthetic construct
  source 1..21: mol_type = other DNA
caatgggctcgcagcctcgag

SEQ ID NO: 35159 - DNA, 21 bp, synthetic construct
  source 1..21: mol_type = other DNA
ggggacgagtgggaacatttt

SEQ ID NO: 35160 - DNA, 21 bp, synthetic construct
  source 1..21: mol_type = other DNA
cgggaagaaactcgctattgg

SEQ ID NO: 35161 - DNA, 21 bp, synthetic construct
  source 1..21: mol_type = other DNA
tactcaaggtataacataaac

SEQ ID NO: 35162 - DNA, 21 bp, synthetic construct
  source 1..21: mol_type = other DNA
tgcgcgcccgtttatagagag

SEQ ID NO: 35163 - DNA, 21 bp, synthetic construct
  source 1..21: mol_type = other DNA
ggtgtaggcacatcacgatgg

SEQ ID NO: 35164 - DNA, 21 bp, synthetic construct
  source 1..21: mol_type = other DNA
tgcaaaacattttcaaaagaa

SEQ ID NO: 35165 - DNA, 21 bp, synthetic construct
  source 1..21: mol_type = other DNA
acttgggacggtctagtagcg

SEQ ID NO: 35166 - DNA, 21 bp, synthetic construct
  source 1..21: mol_type = other DNA
tttagccgagttaactacaac

SEQ ID NO: 35167 - DNA, 21 bp, synthetic construct
  source 1..21: mol_type = other DNA
tattggtcgggcgagagagaa

SEQ ID NO: 35168 - DNA, 21 bp, synthetic construct
  source 1..21: mol_type = other DNA
cgcgacgtaacggttttcccg

SEQ ID NO: 35169 - DNA, 21 bp, synthetic construct
  source 1..21: mol_type = other DNA
ttagcggggcgcggatgggac

SEQ ID NO: 35170 - DNA, 21 bp, synthetic construct
  source 1..21: mol_type = other DNA
tatgcgaagaatggccaaaat

SEQ ID NO: 35171 - DNA, 21 bp, synthetic construct
  source 1..21: mol_type = other DNA
agtatgcgggacaggagttgg

SEQ ID NO: 35172 - DNA, 21 bp, synthetic construct
  source 1..21: mol_type = other DNA
tactcgcgccacaatatgaac

SEQ ID NO: 35173 - DNA, 21 bp, synthetic construct
  source 1..21: mol_type = other DNA
ttttttaccggacgcatggac

SEQ ID NO: 35174 - DNA, 21 bp, synthetic construct
  source 1..21: mol_type = other DNA
atggttcgaaaccaaccgaac

SEQ ID NO: 35175 - DNA, 21 bp, synthetic construct
  source 1..21: mol_type = other DNA
ttcagtcgcgcaaatacgaat

SEQ ID NO: 35176 - DNA, 21 bp, synthetic construct
  source 1..21: mol_type = other DNA
agtctctcgtcatccgtttgg

SEQ ID NO: 35177 - DNA, 21 bp, synthetic construct
  source 1..21: mol_type = other DNA
acttggtcaggtgacaatgcc

SEQ ID NO: 35178 - DNA, 21 bp, synthetic construct
  source 1..21: mol_type = other DNA
ttaaaaggtagttgcgagcag

SEQ ID NO: 35179 - DNA, 21 bp, synthetic construct
  source 1..21: mol_type = other DNA
tatttccagggtgtcagagac

SEQ ID NO: 35180 - DNA, 21 bp, synthetic construct
  source 1..21: mol_type = other DNA
tgtaacaaacctatgactcag

SEQ ID NO: 35181 - DNA, 21 bp, synthetic construct
  source 1..21: mol_type = other DNA
gggagcgagtttcatacatgg

SEQ ID NO: 35182 - DNA, 21 bp, synthetic construct
  source 1..21: mol_type = other DNA
tacttttccggcataacgacg

SEQ ID NO: 35183 - DNA, 21 bp, synthetic construct
  source 1..21: mol_type = other DNA
aaaaacgactacaacacttgg

SEQ ID NO: 35184 - DNA, 21 bp, synthetic construct
  source 1..21: mol_type = other DNA
tttgcgaaaaccggctggaac

SEQ ID NO: 35185 - DNA, 21 bp, synthetic construct
  source 1..21: mol_type = other DNA
tacttttcagggtatacgtca

SEQ ID NO: 35186 - DNA, 21 bp, synthetic construct
  source 1..21: mol_type = other DNA
tacactcgcacgcaagcatat

SEQ ID NO: 35187 - DNA, 21 bp, synthetic construct
  source 1..21: mol_type = other DNA
tattatagtggagttgcactc

SEQ ID NO: 35188 - DNA, 21 bp, synthetic construct
  source 1..21: mol_type = other DNA
ggcggcggaactagcacatgg

SEQ ID NO: 35189 - DNA, 21 bp, synthetic construct
  source 1..21: mol_type = other DNA
agaggagatagtagccgttgg

SEQ ID NO: 35190 - DNA, 21 bp, synthetic construct
  source 1..21: mol_type = other DNA
agagatcccggggtccggtgg

SEQ ID NO: 35191 - DNA, 21 bp, synthetic construct
  source 1..21: mol_type = other DNA
tcagacggattctctaaatgg

SEQ ID NO: 35192 - DNA, 21 bp, synthetic construct
  source 1..21: mol_type = other DNA
tactatcacggcgtacgtgat

SEQ ID NO: 35193 - DNA, 21 bp, synthetic construct
  source 1..21: mol_type = other DNA
actgatgactggtcgacctgg

SEQ ID NO: 35194 - DNA, 21 bp, synthetic construct
  source 1..21: mol_type = other DNA
agaacctatgaagtgtatcct

SEQ ID NO: 35195 - DNA, 21 bp, synthetic construct
  source 1..21: mol_type = other DNA
gaggctttaaacggctgggac

SEQ ID NO: 35196 - DNA, 21 bp, synthetic construct
  source 1..21: mol_type = other DNA
gtcgcgaccttgggctgggat

SEQ ID NO: 35197 - DNA, 21 bp, synthetic construct
  source 1..21: mol_type = other DNA
aagaacgactacaatagctgg

SEQ ID NO: 35198 - DNA, 21 bp, synthetic construct
  source 1..21: mol_type = other DNA
aggcttgaggcggctaattgg

SEQ ID NO: 35199 - DNA, 21 bp, synthetic construct
  source 1..21: mol_type = other DNA
ggaggtgacttcgaacattgg

SEQ ID NO: 35200 - DNA, 21 bp, synthetic construct
  source 1..21: mol_type = other DNA
atgaaggatgggactgcttcg

SEQ ID NO: 35201 - DNA, 21 bp, synthetic construct
  source 1..21: mol_type = other DNA
aaagatgggtacactacttgg

SEQ ID NO: 35202 - DNA, 21 bp, synthetic construct
  source 1..21: mol_type = other DNA
agaatgagtacgaatggtata

SEQ ID NO: 35203 - DNA, 21 bp, synthetic construct
  source 1..21: mol_type = other DNA
cagcgggatggcacccccgct

SEQ ID NO: 35204 - DNA, 21 bp, synthetic construct
  source 1..21: mol_type = other DNA
tgggtcagaagtgacacgaag

SEQ ID NO: 35205 - DNA, 21 bp, synthetic construct
  source 1..21: mol_type = other DNA
tattcaagacacaacttcaac

SEQ ID NO: 35206 - DNA, 21 bp, synthetic construct
  source 1..21: mol_type = other DNA
cggggagcaggagtttatccc

SEQ ID NO: 35207 - DNA, 21 bp, synthetic construct
  source 1..21: mol_type = other DNA
ttcggtaagggtgaatgggcg

SEQ ID NO: 35208 - DNA, 21 bp, synthetic construct
  source 1..21: mol_type = other DNA
acccgtgagggtgaccctccg

SEQ ID NO: 35209 - DNA, 21 bp, synthetic construct
  source 1..21: mol_type = other DNA
tacttcgccggagtgaaggtg

SEQ ID NO: 35210 - DNA, 21 bp, synthetic construct
  source 1..21: mol_type = other DNA
tattgggctggcgtgatagat

SEQ ID NO: 35211 - DNA, 21 bp, synthetic construct
  source 1..21: mol_type = other DNA
ttgcatcgtgagtcacctaat

SEQ ID NO: 35212 - DNA, 21 bp, synthetic construct
  source 1..21: mol_type = other DNA
tactcaagggtaaattataat

SEQ ID NO: 35213 - DNA, 21 bp, synthetic construct
  source 1..21: mol_type = other DNA
tacgtacgatttgaccagggc

SEQ ID NO: 35214 - DNA, 21 bp, synthetic construct
  source 1..21: mol_type = other DNA
tgcaaacctgactcaagagtg

SEQ ID NO: 35215 - DNA, 21 bp, synthetic construct
  source 1..21: mol_type = other DNA
caagacagcacgaacggtagg

SEQ ID NO: 35216 - DNA, 21 bp, synthetic construct
  source 1..21: mol_type = other DNA
tattattcggggcaaaaaagt

SEQ ID NO: 35217 - DNA, 21 bp, synthetic construct
  source 1..21: mol_type = other DNA
tattttatgggagaaagggaa

SEQ ID NO: 35218 - DNA, 21 bp, synthetic construct
  source 1..21: mol_type = other DNA
tattcaaggtccggtggcaat

SEQ ID NO: 35219 - DNA, 21 bp, synthetic construct
  source 1..21: mol_type = other DNA
ggagggtcaggatcgagttgg

SEQ ID NO: 35220 - DNA, 21 bp, synthetic construct
  source 1..21: mol_type = other DNA
tcatatgacggtacagcagcc

SEQ ID NO: 35221 - DNA, 21 bp, synthetic construct
  source 1..21: mol_type = other DNA
tatgcgcggtcaaacgtcaat

SEQ ID NO: 35222 - DNA, 21 bp, synthetic construct
  source 1..21: mol_type = other DNA
tacagttctaccaatggtata

SEQ ID NO: 35223 - DNA, 21 bp, synthetic construct
  source 1..21: mol_type = other DNA
tatactcatacacaaaggaat

SEQ ID NO: 35224 - DNA, 21 bp, synthetic construct
  source 1..21: mol_type = other DNA
tatagtcgacacaatataaat

SEQ ID NO: 35225 - DNA, 21 bp, synthetic construct
  source 1..21: mol_type = other DNA
ttcatggatggaactcccgct

SEQ ID NO: 35226 - DNA, 21 bp, synthetic construct
  source 1..21: mol_type = other DNA
tggtggagcgggaggattgaa

SEQ ID NO: 35227 - DNA, 21 bp, synthetic construct
  source 1..21: mol_type = other DNA
ctcagaaacggcactggcccg

SEQ ID NO: 35228 - DNA, 21 bp, synthetic construct
  source 1..21: mol_type = other DNA
ctaccccgcacaggtgattgg

SEQ ID NO: 35229 - DNA, 21 bp, synthetic construct
  source 1..21: mol_type = other DNA
ctcagcagcactaacggtgtt

SEQ ID NO: 35230 - DNA, 21 bp, synthetic construct
  source 1..21: mol_type = other DNA
tattctcgtcatgggcaaaat

SEQ ID NO: 35231 - DNA, 21 bp, synthetic construct
  source 1..21: mol_type = other DNA
tacttctcaggaaccaataat

SEQ ID NO: 35232 - DNA, 21 bp, synthetic construct
  source 1..21: mol_type = other DNA
ttctttaccggtcggcttgat

SEQ ID NO: 35233 - DNA, 21 bp, synthetic construct
  source 1..21: mol_type = other DNA
ttatggtcaggcgaagcgccc

SEQ ID NO: 35234 - DNA, 21 bp, synthetic construct
  source 1..21: mol_type = other DNA
aattgggctaggagtgtagaa

SEQ ID NO: 35235 - DNA, 21 bp, synthetic construct
  source 1..21: mol_type = other DNA
tactcgaaacatggccataac

SEQ ID NO: 35236 - DNA, 21 bp, synthetic construct
  source 1..21: mol_type = other DNA
gggtgtagaccctgccctact

SEQ ID NO: 35237 - DNA, 21 bp, synthetic construct
  source 1..21: mol_type = other DNA
acacgctggggagaaaatgcc

SEQ ID NO: 35238 - DNA, 21 bp, synthetic construct
  source 1..21: mol_type = other DNA
tactctaagtatggcgcgaat

SEQ ID NO: 35239 - DNA, 21 bp, synthetic construct
  source 1..21: mol_type = other DNA
ttaacttatgatgcgtatgaa

SEQ ID NO: 35240 - DNA, 21 bp, synthetic construct
  source 1..21: mol_type = other DNA
ctctttcgttcaggacccaac

SEQ ID NO: 35241 - DNA, 21 bp, synthetic construct
  source 1..21: mol_type = other DNA
tacagcaggcataatcagaac

SEQ ID NO: 35242 - DNA, 21 bp, synthetic construct
  source 1..21: mol_type = other DNA
aggactgtccatacgtacccc

SEQ ID NO: 35243 - DNA, 21 bp, synthetic construct
  source 1..21: mol_type = other DNA
tccgatggcgtatcctactgg

SEQ ID NO: 35244 - DNA, 21 bp, synthetic construct
  source 1..21: mol_type = other DNA
atgcccgatggtacgggtccg

SEQ ID NO: 35245 - DNA, 21 bp, synthetic construct
  source 1..21: mol_type = other DNA
tatttcgcggggcgtctagcg

SEQ ID NO: 35246 - DNA, 21 bp, synthetic construct
  source 1..21: mol_type = other DNA
tacagatctaccaacggcgtc

SEQ ID NO: 35247 - DNA, 21 bp, synthetic construct
  source 1..21: mol_type = other DNA
tggacaagcgataacgggatt

SEQ ID NO: 35248 - DNA, 21 bp, synthetic construct
  source 1..21: mol_type = other DNA
tactggcaaggaaccgttgca

SEQ ID NO: 35249 - DNA, 21 bp, synthetic construct
  source 1..21: mol_type = other DNA
gtaatgagcgataacggcatt

SEQ ID NO: 35250 - DNA, 21 bp, synthetic construct
  source 1..21: mol_type = other DNA
ggtggaccgggcacacgctgg

SEQ ID NO: 35251 - DNA, 21 bp, synthetic construct
  source 1..21: mol_type = other DNA
tttatggacggcacgcctgca

SEQ ID NO: 35252 - DNA, 21 bp, synthetic construct
  source 1..21: mol_type = other DNA
caaagagacggaactccagcc

SEQ ID NO: 35253 - DNA, 21 bp, synthetic construct
  source 1..21: mol_type = other DNA
tattggagtggccgtcctgaa

SEQ ID NO: 35254 - DNA, 21 bp, synthetic construct
  source 1..21: mol_type = other DNA
tggtatagtggcgttagggag

SEQ ID NO: 35255 - DNA, 21 bp, synthetic construct
  source 1..21: mol_type = other DNA
ttaagtaaatctgggtttaat

SEQ ID NO: 35256 - DNA, 21 bp, synthetic construct
  source 1..21: mol_type = other DNA
tccatggcttctaatacttgg

SEQ ID NO: 35257 - DNA, 21 bp, synthetic construct
  source 1..21: mol_type = other DNA
tggcatagtacgaacggtgtt

SEQ ID NO: 35258 - DNA, 21 bp, synthetic construct
  source 1..21: mol_type = other DNA
ggtggcgtcagctcgacatgg

SEQ ID NO: 35259 - DNA, 21 bp, synthetic construct
  source 1..21: mol_type = other DNA
ataggaatgaagggctgggat

SEQ ID NO: 35260 - DNA, 21 bp, synthetic construct
  source 1..21: mol_type = other DNA
aaggacgacttccaatcattt

SEQ ID NO: 35261 - DNA, 21 bp, synthetic construct
  source 1..21: mol_type = other DNA
tacagccgaaacggatataac

SEQ ID NO: 35262 - DNA, 21 bp, synthetic construct
  source 1..21: mol_type = other DNA
ggagtgggaactagcaggtgg

SEQ ID NO: 35263 - DNA, 21 bp, synthetic construct
  source 1..21: mol_type = other DNA
tattattcgggtactagaagt

SEQ ID NO: 35264 - DNA, 21 bp, synthetic construct
  source 1..21: mol_type = other DNA
gtaagtgaatttcaaacttac

SEQ ID NO: 35265 - DNA, 21 bp, synthetic construct
  source 1..21: mol_type = other DNA
tacgcaaaagtaggatacaac

SEQ ID NO: 35266 - DNA, 21 bp, synthetic construct
  source 1..21: mol_type = other DNA
tattcgaggcatggaacgaac

SEQ ID NO: 35267 - DNA, 21 bp, synthetic construct
  source 1..21: mol_type = other DNA
gacctcggatcggcgagctgg

SEQ ID NO: 35268 - DNA, 21 bp, synthetic construct
  source 1..21: mol_type = other DNA
atcttatcctccagcgggtgg

SEQ ID NO: 35269 - DNA, 21 bp, synthetic construct
  source 1..21: mol_type = other DNA
acaaagttaggtgacaacgca

SEQ ID NO: 35270 - DNA, 21 bp, synthetic construct
  source 1..21: mol_type = other DNA
tggacctctgacaatggtatc

SEQ ID NO: 35271 - DNA, 21 bp, synthetic construct
  source 1..21: mol_type = other DNA
tacatcaaaagccagagttat

SEQ ID NO: 35272 - DNA, 21 bp, synthetic construct
  source 1..21: mol_type = other DNA
cttgcaggccgagggtgggat

SEQ ID NO: 35273 - DNA, 21 bp, synthetic construct
  source 1..21: mol_type = other DNA
gccaatagtacgaatggcgta

SEQ ID NO: 35274 - DNA, 21 bp, synthetic construct
  source 1..21: mol_type = other DNA
attgacgaatggcagagctac

SEQ ID NO: 35275 - DNA, 21 bp, synthetic construct
  source 1..21: mol_type = other DNA
cgtctagagagcgttcagtgg

SEQ ID NO: 35276 - DNA, 21 bp, synthetic construct
  source 1..21: mol_type = other DNA
gggggggaatacgtgacgtgg

SEQ ID NO: 35277 - DNA, 21 bp, synthetic construct
  source 1..21: mol_type = other DNA
ccaggagggaccagcacatgg

SEQ ID NO: 35278 - DNA, 21 bp, synthetic construct
  source 1..21: mol_type = other DNA
tatagtcggatgggtgggaac

SEQ ID NO: 35279 - DNA, 21 bp, synthetic construct
  source 1..21: mol_type = other DNA
tactcaagggggaacctgaac

SEQ ID NO: 35280 - DNA, 21 bp, synthetic construct
  source 1..21: mol_type = other DNA
tacgcccgtgccaacttcaat

SEQ ID NO: 35281 - DNA, 21 bp, synthetic construct
  source 1..21: mol_type = other DNA
agaaatggtgccagtagttgg

SEQ ID NO: 35282 - DNA, 21 bp, synthetic construct
  source 1..21: mol_type = other DNA
tgcaaaacggaagccagagga

SEQ ID NO: 35283 - DNA, 21 bp, synthetic construct
  source 1..21: mol_type = other DNA
tctatgatggatcgctcgtgg

SEQ ID NO: 35284 - DNA, 21 bp, synthetic construct
  source 1..21: mol_type = other DNA
cgagatgattgggtcaaatgg

SEQ ID NO: 35285 - DNA, 21 bp, synthetic construct
  source 1..21: mol_type = other DNA
tggaccagcgacaatggaata

SEQ ID NO: 35286 - DNA, 21 bp, synthetic construct
  source 1..21: mol_type = other DNA
tattacagcggcacgagatcc

SEQ ID NO: 35287 - DNA, 21 bp, synthetic construct
  source 1..21: mol_type = other DNA
ttcttctcaggcgttgtaaaa

SEQ ID NO: 35288 - DNA, 21 bp, synthetic construct
  source 1..21: mol_type = other DNA
tacttcgccggggtaatggag

SEQ ID NO: 35289 - DNA, 21 bp, synthetic construct
  source 1..21: mol_type = other DNA
tgtaagccagggatgagagaa

SEQ ID NO: 35290 - DNA, 21 bp, synthetic construct
  source 1..21: mol_type = other DNA
actaccagccaaaacggtcga

SEQ ID NO: 35291 - DNA, 21 bp, synthetic construct
  source 1..21: mol_type = other DNA
cgtctggaaagcaccgtctgg

SEQ ID NO: 35292 - DNA, 21 bp, synthetic construct
  source 1..21: mol_type = other DNA
tattggagcggaacttcgtcg

SEQ ID NO: 35293 - DNA, 21 bp, synthetic construct
  source 1..21: mol_type = other DNA
tatgctcgtaatggagggaac

SEQ ID NO: 35294 - DNA, 21 bp, synthetic construct
  source 1..21: mol_type = other DNA
cagaacagcacaaatggacgc

SEQ ID NO: 35295 - DNA, 21 bp, synthetic construct
  source 1..21: mol_type = other DNA
tactacacaggctacaaagag

SEQ ID NO: 35296 - DNA, 21 bp, synthetic construct
  source 1..21: mol_type = other DNA
tccttaagctcgagtgtgtgg

SEQ ID NO: 35297 - DNA, 21 bp, synthetic construct
  source 1..21: mol_type = other DNA
cctgcgtcaaccaatggggtc

SEQ ID NO: 35298 - DNA, 21 bp, synthetic construct
  source 1..21: mol_type = other DNA
ttttttagcgggcgcttagag

SEQ ID NO: 35299 - DNA, 21 bp, synthetic construct
  source 1..21: mol_type = other DNA
tgtggtaagagggatcctgac

SEQ ID NO: 35300 - DNA, 21 bp, synthetic construct
  source 1..21: mol_type = other DNA
tatagcaggaacaattacaac

SEQ ID NO: 35301 - DNA, 21 bp, synthetic construct
  source 1..21: mol_type = other DNA
tcgatgcaggatcgtaggtgg

SEQ ID NO: 35302 - DNA, 21 bp, synthetic construct
  source 1..21: mol_type = other DNA
cgtgaagactggagcacatac

SEQ ID NO: 35303 - DNA, 21 bp, synthetic construct
  source 1..21: mol_type = other DNA
ttggccaagcagggattcaat

SEQ ID NO: 35304 - DNA, 21 bp, synthetic construct
  source 1..21: mol_type = other DNA
tacgtctacagcgattcgcgt

SEQ ID NO: 35305 - DNA, 21 bp, synthetic construct
  source 1..21: mol_type = other DNA
agggacgagtaccaaacgtgg

SEQ ID NO: 35306 - DNA, 21 bp, synthetic construct
  source 1..21: mol_type = other DNA
tacgcacgtctaggcttcaac

SEQ ID NO: 35307 - DNA, 21 bp, synthetic construct
  source 1..21: mol_type = other DNA
ttttggtcaggcacgcatgat

SEQ ID NO: 35308 - DNA, 21 bp, synthetic construct
  source 1..21: mol_type = other DNA
tataattcgaccaatggtata

SEQ ID NO: 35309 - DNA, 21 bp, synthetic construct
  source 1..21: mol_type = other DNA
aactatgctaaaagctatgca

SEQ ID NO: 35310 - DNA, 21 bp, synthetic construct
  source 1..21: mol_type = other DNA
acaggcgactggacgcccttc

SEQ ID NO: 35311 - DNA, 21 bp, synthetic construct
  source 1..21: mol_type = other DNA
ggtggcgggactagcctctgg

SEQ ID NO: 35312 - DNA, 21 bp, synthetic construct
  source 1..21: mol_type = other DNA
tacgcgagggccggtacgaac

SEQ ID NO: 35313 - DNA, 21 bp, synthetic construct
  source 1..21: mol_type = other DNA
ggaggcgaatcctctctctgg

SEQ ID NO: 35314 - DNA, 21 bp, synthetic construct
  source 1..21: mol_type = other DNA
agaggagaatttatgagctac

SEQ ID NO: 35315 - DNA, 21 bp, synthetic construct
  source 1..21: mol_type = other DNA
tacgccagagggaactataac

SEQ ID NO: 35316 - DNA, 21 bp, synthetic construct
  source 1..21: mol_type = other DNA
ggggtgaaccaagttcgctgg

SEQ ID NO: 35317 - DNA, 21 bp, synthetic construct
  source 1..21: mol_type = other DNA
gattatgaatcaagaaagtgg

SEQ ID NO: 35318 - DNA, 21 bp, synthetic construct
  source 1..21: mol_type = other DNA
tattggtcaaaggtcgccgac

SEQ ID NO: 35319 - DNA, 21 bp, synthetic construct
  source 1..21: mol_type = other DNA
cgtacttatgatacctttgca

SEQ ID NO: 35320 - DNA, 21 bp, synthetic construct
  source 1..21: mol_type = other DNA
ttctggcacggtgtcagtgac

SEQ ID NO: 35321 - DNA, 21 bp, synthetic construct
  source 1..21: mol_type = other DNA
caggacgagtggacctacgtc

SEQ ID NO: 35322 - DNA, 21 bp, synthetic construct
  source 1..21: mol_type = other DNA
ctctcgaaagccaacatcaac

SEQ ID NO: 35323 - DNA, 21 bp, synthetic construct
  source 1..21: mol_type = other DNA
cgtgaaacctatgtctatcct

SEQ ID NO: 35324 - DNA, 21 bp, synthetic construct
  source 1..21: mol_type = other DNA
actgacgactactcaaaatgg

SEQ ID NO: 35325 - DNA, 21 bp, synthetic construct
  source 1..21: mol_type = other DNA
tgtaagcgagtgcagattgag

SEQ ID NO: 35326 - DNA, 21 bp, synthetic construct
  source 1..21: mol_type = other DNA
gcagagtcaagtaggttgtgg

SEQ ID NO: 35327 - DNA, 21 bp, synthetic construct
  source 1..21: mol_type = other DNA
ggcggagaggggtctgcatgg

SEQ ID NO: 35328 - DNA, 21 bp, synthetic construct
  source 1..21: mol_type = other DNA
ggcgaagaacatgttcggtgg

SEQ ID NO: 35329 - DNA, 21 bp, synthetic construct
  source 1..21: mol_type = other DNA
actagaacaggcgagaatgct

SEQ ID NO: 35330 - DNA, 21 bp, synthetic construct
  source 1..21: mol_type = other DNA
tactcgaaggcccaaggcgtc

SEQ ID NO: 35331 - DNA, 21 bp, synthetic construct
  source 1..21: mol_type = other DNA
aggttagagtctacagtttgg

SEQ ID NO: 35332 - DNA, 21 bp, synthetic construct
  source 1..21: mol_type = other DNA
attccaccactttttaacgtc

SEQ ID NO: 35333 - DNA, 21 bp, synthetic construct
  source 1..21: mol_type = other DNA
tttcggtcaactaacggtatc

SEQ ID NO: 35334 - DNA, 21 bp, synthetic construct
  source 1..21: mol_type = other DNA
acacgaaccggagaaaacgca

SEQ ID NO: 35335 - DNA, 21 bp, synthetic construct
  source 1..21: mol_type = other DNA
tacgctaggcatgggttaaac

SEQ ID NO: 35336 - DNA, 21 bp, synthetic construct
  source 1..21: mol_type = other DNA
tattcaaagtcgggcgccaat

SEQ ID NO: 35337 - DNA, 21 bp, synthetic construct
  source 1..21: mol_type = other DNA
gacctccgcactgctgcctgg

SEQ ID NO: 35338 - DNA, 21 bp, synthetic construct
  source 1..21: mol_type = other DNA
tattcacgaggcgggtacaat

SEQ ID NO: 35339 - DNA, 21 bp, synthetic construct
  source 1..21: mol_type = other DNA
aggacgtacgacacgttcgcc

SEQ ID NO: 35340 - DNA, 21 bp, synthetic construct
  source 1..21: mol_type = other DNA
ccgttaaagtcttctttgtgg

SEQ ID NO: 35341 - DNA, 21 bp, synthetic construct
  source 1..21: mol_type = other DNA
aaagaagattggacgccgtgg

SEQ ID NO: 35342 - DNA, 21 bp, synthetic construct
  source 1..21: mol_type = other DNA
tattccagagtaagcgataac

SEQ ID NO: 35343 - DNA, 21 bp, synthetic construct
  source 1..21: mol_type = other DNA
cgaggcgagtaccattatcca

SEQ ID NO: 35344 - DNA, 21 bp, synthetic construct
  source 1..21: mol_type = other DNA
tacgcgcgtcatggcaataat

SEQ ID NO: 35345 - DNA, 21 bp, synthetic construct
  source 1..21: mol_type = other DNA
atagcttcaaagggggcggga

SEQ ID NO: 35346 - DNA, 21 bp, synthetic construct
  source 1..21: mol_type = other DNA
ttagccaaaatggggcctaat

SEQ ID NO: 35347 - DNA, 21 bp, synthetic construct
  source 1..21: mol_type = other DNA
ggaagcgagtttatcacattt

SEQ ID NO: 35348 - DNA, 21 bp, synthetic construct
  source 1..21: mol_type = other DNA
ctttggaacggcacggccccg

SEQ ID NO: 35349 - DNA, 21 bp, synthetic construct
  source 1..21: mol_type = other DNA
acatggtctagcaatggcgtg

SEQ ID NO: 35350 - DNA, 21 bp, synthetic construct
  source 1..21: mol_type = other DNA
accttctacggagccaacgct

SEQ ID NO: 35351 - DNA, 21 bp, synthetic construct
  source 1..21: mol_type = other DNA
ggaggcactggctcaagttgg

SEQ ID NO: 35352 - DNA, 21 bp, synthetic construct
  source 1..21: mol_type = other DNA
tcgagccccggtgtgcggtgg

SEQ ID NO: 35353 - DNA, 21 bp, synthetic construct
  source 1..21: mol_type = other DNA
gaaatggagtcagtaaagtgg

SEQ ID NO: 35354 - DNA, 21 bp, synthetic construct
  source 1..21: mol_type = other DNA
ttctcgagaatgaacgctaac

SEQ ID NO: 35355 - DNA, 21 bp, synthetic construct
  source 1..21: mol_type = other DNA
tatagcagagctaatcccaat

SEQ ID NO: 35356 - DNA, 21 bp, synthetic construct
  source 1..21: mol_type = other DNA
accagatatggtgagaatgcg

SEQ ID NO: 35357 - DNA, 21 bp, synthetic construct
  source 1..21: mol_type = other DNA
agatcggaaactagctactgg

SEQ ID NO: 35358 - DNA, 21 bp, synthetic construct
  source 1..21: mol_type = other DNA
aactgggcacggtctcttgag

SEQ ID NO: 35359 - DNA, 21 bp, synthetic construct
  source 1..21: mol_type = other DNA
cgtggcgagttcgttagttgg

SEQ ID NO: 35360 - DNA, 21 bp, synthetic construct
  source 1..21: mol_type = other DNA
aactgggctcgctccatagag

SEQ ID NO: 35361 - DNA, 21 bp, synthetic construct
  source 1..21: mol_type = other DNA
cgtagtgagtttaccccctac

SEQ ID NO: 35362 - DNA, 21 bp, synthetic construct
  source 1..21: mol_type = other DNA
atcgatgagtggcaatcttat

SEQ ID NO: 35363 - DNA, 21 bp, synthetic construct
  source 1..21: mol_type = other DNA
tttgcccgaagcggtaacaac

SEQ ID NO: 35364 - DNA, 21 bp, synthetic construct
  source 1..21: mol_type = other DNA
cggagtgagttttcaggtttc

SEQ ID NO: 35365 - DNA, 21 bp, synthetic construct
  source 1..21: mol_type = other DNA
atagatgagtggaaaacctgg

SEQ ID NO: 35366 - DNA, 21 bp, synthetic construct
  source 1..21: mol_type = other DNA
tatagtaaatggaacaataat

SEQ ID NO: 35367 - DNA, 21 bp, synthetic construct
  source 1..21: mol_type = other DNA
ggtttgagctcagcgacatgg

SEQ ID NO: 35368 - DNA, 21 bp, synthetic construct
  source 1..21: mol_type = other DNA
tattcacgtttagactacgac

SEQ ID NO: 35369 - DNA, 21 bp, synthetic construct
  source 1..21: mol_type = other DNA
agggggggtcagtccacgtgg

SEQ ID NO: 35370 - DNA, 21 bp, synthetic construct
  source 1..21: mol_type = other DNA
gtccataaattgtgcccagta

SEQ ID NO: 35371 - DNA, 21 bp, synthetic construct
  source 1..21: mol_type = other DNA
aaagacgactatatgtactac

SEQ ID NO: 35372 - DNA, 21 bp, synthetic construct
  source 1..21: mol_type = other DNA
gaccttgagagtgcacgctgg

SEQ ID NO: 35373 - DNA, 21 bp, synthetic construct
  source 1..21: mol_type = other DNA
tactacagtggaacacgctcc

SEQ ID NO: 35374 - DNA, 21 bp, synthetic construct
  source 1..21: mol_type = other DNA
cggggcgactcacccttgtgg

SEQ ID NO: 35375 - DNA, 21 bp, synthetic construct
  source 1..21: mol_type = other DNA
aaggatgactacaaaacatgg

SEQ ID NO: 35376 - DNA, 21 bp, synthetic construct
  source 1..21: mol_type = other DNA
tatgcacggaacagtgacaac

SEQ ID NO: 35377 - DNA, 21 bp, synthetic construct
  source 1..21: mol_type = other DNA
agtgtgagtaccaatggtgta

SEQ ID NO: 35378 - DNA, 21 bp, synthetic construct
  source 1..21: mol_type = other DNA
tatgcgagaataggttacaat

SEQ ID NO: 35379 - DNA, 21 bp, synthetic construct
  source 1..21: mol_type = other DNA
ggggatgaatggcagccatac

SEQ ID NO: 35380 - DNA, 21 bp, synthetic construct
  source 1..21: mol_type = other DNA
agcatgcaggaccgcgcatgg

SEQ ID NO: 35381 - DNA, 21 bp, synthetic construct
  source 1..21: mol_type = other DNA
ggatccccaggtgctcactgg

SEQ ID NO: 35382 - DNA, 21 bp, synthetic construct
  source 1..21: mol_type = other DNA
agagggggagaaggggaatgc

SEQ ID NO: 35383 - DNA, 21 bp, synthetic construct
  source 1..21: mol_type = other DNA
tacgcgcgacacgggatgaat

SEQ ID NO: 35384 - DNA, 21 bp, synthetic construct
  source 1..21: mol_type = other DNA
tacttcacaggccatacgatg

SEQ ID NO: 35385 - DNA, 21 bp, synthetic construct
  source 1..21: mol_type = other DNA
ggagagcccggtgtaaggtgg

SEQ ID NO: 35386 - DNA, 21 bp, synthetic construct
  source 1..21: mol_type = other DNA
ctctggaaaaccggtcacaat

SEQ ID NO: 35387 - DNA, 21 bp, synthetic construct
  source 1..21: mol_type = other DNA
tgcaaaagggttcaaatagaa

SEQ ID NO: 35388 - DNA, 21 bp, synthetic construct
  source 1..21: mol_type = other DNA
cgtggcgaattcttatcctac

SEQ ID NO: 35389 - DNA, 21 bp, synthetic construct
  source 1..21: mol_type = other DNA
attcccagtagttcgttatgg

SEQ ID NO: 35390 - DNA, 21 bp, synthetic construct
  source 1..21: mol_type = other DNA
tattctcgcaataactttaat

SEQ ID NO: 35391 - DNA, 21 bp, synthetic construct
  source 1..21: mol_type = other DNA
acattctatggagacgccgct

SEQ ID NO: 35392 - DNA, 21 bp, synthetic construct
  source 1..21: mol_type = other DNA
tattggggcggcgttacggct

SEQ ID NO: 35393 - DNA, 21 bp, synthetic construct
  source 1..21: mol_type = other DNA
tacttctcagggcgcccttct

SEQ ID NO: 35394 - DNA, 21 bp, synthetic construct
  source 1..21: mol_type = other DNA
tactggtcaggactccccgat

SEQ ID NO: 35395 - DNA, 21 bp, synthetic construct
  source 1..21: mol_type = other DNA
ggtgggccgggcagcatctgg

SEQ ID NO: 35396 - DNA, 21 bp, synthetic construct
  source 1..21: mol_type = other DNA
ggaatggagcacgtacgctgg

SEQ ID NO: 35397 - DNA, 21 bp, synthetic construct
  source 1..21: mol_type = other DNA
gtgtccactcacgcgtgcgcg

SEQ ID NO: 35398 - DNA, 21 bp, synthetic construct
  source 1..21: mol_type = other DNA
ttttcaaggatgaataccaat

SEQ ID NO: 35399 - DNA, 21 bp, synthetic construct
  source 1..21: mol_type = other DNA
cgtgaggcggtctcgtcatgg

SEQ ID NO: 35400 - DNA, 21 bp, synthetic construct
  source 1..21: mol_type = other DNA
taccagcgtcaaggctgggac

SEQ ID NO: 35401 - DNA, 21 bp, synthetic construct
  source 1..21: mol_type = other DNA
gtattacaaagtagttcatgg

SEQ ID NO: 35402 - DNA, 21 bp, synthetic construct
  source 1..21: mol_type = other DNA
gcgaatgattatatgtcgtat

SEQ ID NO: 35403 - DNA, 21 bp, synthetic construct
  source 1..21: mol_type = other DNA
ttttggcatggaacgatcgag

SEQ ID NO: 35404 - DNA, 21 bp, synthetic construct
  source 1..21: mol_type = other DNA
aacctggaaagccacaagtgg

SEQ ID NO: 35405 - DNA, 21 bp, synthetic construct
  source 1..21: mol_type = other DNA
cggtcggagttcaccggcttt

SEQ ID NO: 35406 - DNA, 21 bp, synthetic construct
  source 1..21: mol_type = other DNA
tactcgcgtctggatgttttt

SEQ ID NO: 35407 - DNA, 21 bp, synthetic construct
  source 1..21: mol_type = other DNA
tatcacgctaagagtccgtgt

SEQ ID NO: 35408 - DNA, 21 bp, synthetic construct
  source 1..21: mol_type = other DNA
agaaatgaatttaccagtttt

SEQ ID NO: 35409 - DNA, 21 bp, synthetic construct
  source 1..21: mol_type = other DNA
ctttgggatggaactgaggca

SEQ ID NO: 35410 - DNA, 21 bp, synthetic construct
  source 1..21: mol_type = other DNA
cggagtgaatttaccccctac

SEQ ID NO: 35411 - DNA, 21 bp, synthetic construct
  source 1..21: mol_type = other DNA
tatcaccgcaacagtgataat

SEQ ID NO: 35412 - DNA, 21 bp, synthetic construct
  source 1..21: mol_type = other DNA
ggaggtggaacgacacgatgg

SEQ ID NO: 35413 - DNA, 21 bp, synthetic construct
  source 1..21: mol_type = other DNA
tcgatggacagcaggagctgg

SEQ ID NO: 35414 - DNA, 21 bp, synthetic construct
  source 1..21: mol_type = other DNA
aaggatgactggaattcgtat

SEQ ID NO: 35415 - DNA, 21 bp, synthetic construct
  source 1..21: mol_type = other DNA
gtctcggattttctcgtatat

SEQ ID NO: 35416 - DNA, 21 bp, synthetic construct
  source 1..21: mol_type = other DNA
acgtgggagggaaccaacgcc

SEQ ID NO: 35417 - DNA, 21 bp, synthetic construct
  source 1..21: mol_type = other DNA
tttgcacgagggggttacaat

SEQ ID NO: 35418 - DNA, 21 bp, synthetic construct
  source 1..21: mol_type = other DNA
ctatatgagtcccgcgcatgg

SEQ ID NO: 35419 - DNA, 21 bp, synthetic construct
  source 1..21: mol_type = other DNA
agcatggccagcaacacgtgg

SEQ ID NO: 35420 - DNA, 21 bp, synthetic construct
  source 1..21: mol_type = other DNA
agggataatggtgttcggtgg

SEQ ID NO: 35421 - DNA, 21 bp, synthetic construct
  source 1..21: mol_type = other DNA
aaaaacgagtatgtaaagtgg

SEQ ID NO: 35422 - DNA, 21 bp, synthetic construct
  source 1..21: mol_type = other DNA
tatcatcgtcttcacccattg

SEQ ID NO: 35423 - DNA, 21 bp, synthetic construct
  source 1..21: mol_type = other DNA
ctagctaagacggcgtggaac

SEQ ID NO: 35424 - DNA, 21 bp, synthetic construct
  source 1..21: mol_type = other DNA
tattctcgtctcagtgaattc

SEQ ID NO: 35425 - DNA, 21 bp, synthetic construct
  source 1..21: mol_type = other DNA
actaatgagtttaagccatgg

SEQ ID NO: 35426 - DNA, 21 bp, synthetic construct
  source 1..21: mol_type = other DNA
cgcgatgactcgagttcatgg

SEQ ID NO: 35427 - DNA, 21 bp, synthetic construct
  source 1..21: mol_type = other DNA
ggatctgagtttaagagctac

SEQ ID NO: 35428 - DNA, 21 bp, synthetic construct
  source 1..21: mol_type = other DNA
aattggtctaccaatggtgtg

SEQ ID NO: 35429 - DNA, 21 bp, synthetic construct
  source 1..21: mol_type = other DNA
tacttcaccgggatggtagtc

SEQ ID NO: 35430 - DNA, 21 bp, synthetic construct
  source 1..21: mol_type = other DNA
ttcgcgcggggcgggtataac

SEQ ID NO: 35431 - DNA, 21 bp, synthetic construct
  source 1..21: mol_type = other DNA
ttctggagcggaacacacgac

SEQ ID NO: 35432 - DNA, 21 bp, synthetic construct
  source 1..21: mol_type = other DNA
ggagggatttcatccacttgg

SEQ ID NO: 35433 - DNA, 21 bp, synthetic construct
  source 1..21: mol_type = other DNA
gactgggctcgatcaccgatg

SEQ ID NO: 35434 - DNA, 21 bp, synthetic construct
  source 1..21: mol_type = other DNA
gcagcgagcaccaatggcgtg

SEQ ID NO: 35435 - DNA, 21 bp, synthetic construct
  source 1..21: mol_type = other DNA
cgtgagcctggatgtaaagag

SEQ ID NO: 35436 - DNA, 21 bp, synthetic construct
  source 1..21: mol_type = other DNA
tgcacgtctaagactcctcac

SEQ ID NO: 35437 - DNA, 21 bp, synthetic construct
  source 1..21: mol_type = other DNA
ttctggaccggcaagattgag

SEQ ID NO: 35438 - DNA, 21 bp, synthetic construct
  source 1..21: mol_type = other DNA
tccgacggtagcagcaagtgg

SEQ ID NO: 35439 - DNA, 21 bp, synthetic construct
  source 1..21: mol_type = other DNA
agaggggaaggggttaggtgg

SEQ ID NO: 35440 - DNA, 21 bp, synthetic construct
  source 1..21: mol_type = other DNA
tggttcacaggtcgacatgat

SEQ ID NO: 35441 - DNA, 21 bp, synthetic construct
  source 1..21: mol_type = other DNA
actaactccacgcatggtatt

SEQ ID NO: 35442 - DNA, 21 bp, synthetic construct
  source 1..21: mol_type = other DNA
cgaggtgagttccacagctac

SEQ ID NO: 35443 - DNA, 21 bp, synthetic construct
  source 1..21: mol_type = other DNA
ttctcacgtagcgggtataac

SEQ ID NO: 35444 - DNA, 21 bp, synthetic construct
  source 1..21: mol_type = other DNA
gacgagaacgccttcccgtac

SEQ ID NO: 35445 - DNA, 21 bp, synthetic construct
  source 1..21: mol_type = other DNA
tatcagagacagtgtgaatca

SEQ ID NO: 35446 - DNA, 21 bp, synthetic construct
  source 1..21: mol_type = other DNA
ggagttgagatggtacgctgg

SEQ ID NO: 35447 - DNA, 21 bp, synthetic construct
  source 1..21: mol_type = other DNA
aggtcagaattcacgccatat

SEQ ID NO: 35448 - DNA, 21 bp, synthetic construct
  source 1..21: mol_type = other DNA
atcccctcctcggtcaagtgg

SEQ ID NO: 35449 - DNA, 21 bp, synthetic construct
  source 1..21: mol_type = other DNA
ttgcgtgacggtagtccgcca

SEQ ID NO: 35450 - DNA, 21 bp, synthetic construct
  source 1..21: mol_type = other DNA
agatcggaatttcaccctttc

SEQ ID NO: 35451 - DNA, 21 bp, synthetic construct
  source 1..21: mol_type = other DNA
tattggtcaggaattcacaac

SEQ ID NO: 35452 - DNA, 21 bp, synthetic construct
  source 1..21: mol_type = other DNA
acccgagacggtactaacgcc

SEQ ID NO: 35453 - DNA, 21 bp, synthetic construct
  source 1..21: mol_type = other DNA
cgcgaggactttcaaacatgg

SEQ ID NO: 35454 - DNA, 21 bp, synthetic construct
  source 1..21: mol_type = other DNA
attggaggcaaatgtccattc

SEQ ID NO: 35455 - DNA, 21 bp, synthetic construct
  source 1..21: mol_type = other DNA
atcggctcgacgaacgggatt

SEQ ID NO: 35456 - DNA, 21 bp, synthetic construct
  source 1..21: mol_type = other DNA
tcttacgccaaatcactgcta

SEQ ID NO: 35457 - DNA, 21 bp, synthetic construct
  source 1..21: mol_type = other DNA
tacgtgcgctctgatcagacc

SEQ ID NO: 35458 - DNA, 21 bp, synthetic construct
  source 1..21: mol_type = other DNA
tggttgaaatcccagtcctac

SEQ ID NO: 35459 - DNA, 21 bp, synthetic construct
  source 1..21: mol_type = other DNA
gccggggccactagtacgtgg

SEQ ID NO: 35460 - DNA, 21 bp, synthetic construct
  source 1..21: mol_type = other DNA
tacatggtcgacgcgtttgtc

SEQ ID NO: 35461 - DNA, 21 bp, synthetic construct
  source 1..21: mol_type = other DNA
tggctaaaaagtcaaagttat

SEQ ID NO: 35462 - DNA, 21 bp, synthetic construct
  source 1..21: mol_type = other DNA
ggagccaatactagcagatgg

SEQ ID NO: 35463 - DNA, 21 bp, synthetic construct
  source 1..21: mol_type = other DNA
tactcgcgaatgaacatgaac

SEQ ID NO: 35464 - DNA, 21 bp, synthetic construct
  source 1..21: mol_type = other DNA
cgcgacgctgttagtcgatgg

SEQ ID NO: 35465 - DNA, 21 bp, synthetic construct
  source 1..21: mol_type = other DNA
tgggaatccactaacggtatc

SEQ ID NO: 35466 - DNA, 21 bp, synthetic construct
  source 1..21: mol_type = other DNA
acatggaacggcgacaacgcg

SEQ ID NO: 35467 - DNA, 21 bp, synthetic construct
  source 1..21: mol_type = other DNA
gtcgatgaatggtccacgttt

SEQ ID NO: 35468 - DNA, 21 bp, synthetic construct
  source 1..21: mol_type = other DNA
tactggaccggcatgatcagt

SEQ ID NO: 35469 - DNA, 21 bp, synthetic construct
  source 1..21: mol_type = other DNA
cgaggggatagccctctgtgg

SEQ ID NO: 35470 - DNA, 21 bp, synthetic construct
  source 1..21: mol_type = other DNA
cttaattctacgaatggggtt

SEQ ID NO: 35471 - DNA, 21 bp, synthetic construct
  source 1..21: mol_type = other DNA
ttctggagtggtacattcgaa

SEQ ID NO: 35472 - DNA, 21 bp, synthetic construct
  source 1..21: mol_type = other DNA
tactggtcgggtcagcatgag

SEQ ID NO: 35473 - DNA, 21 bp, synthetic construct
  source 1..21: mol_type = other DNA
tgcaaaccacggtcaggagag

SEQ ID NO: 35474 - DNA, 21 bp, synthetic construct
  source 1..21: mol_type = other DNA
tcaatctcaacaaacggtgta

SEQ ID NO: 35475 - DNA, 21 bp, synthetic construct
  source 1..21: mol_type = other DNA
acgtggaccggggacatcccc

SEQ ID NO: 35476 - DNA, 21 bp, synthetic construct
  source 1..21: mol_type = other DNA
agtatgcaggatcgacactgg

SEQ ID NO: 35477 - DNA, 21 bp, synthetic construct
  source 1..21: mol_type = other DNA
aatcttgctagtgcaggctgg

SEQ ID NO: 35478 - DNA, 21 bp, synthetic construct
  source 1..21: mol_type = other DNA
ggcggcgaatatgtccgatgg

SEQ ID NO: 35479 - DNA, 21 bp, synthetic construct
  source 1..21: mol_type = other DNA
aaatccgactatatgagcttc

SEQ ID NO: 35480 - DNA, 21 bp, synthetic construct
  source 1..21: mol_type = other DNA
tttagtcggatgaaccacaac

SEQ ID NO: 35481 - DNA, 21 bp, synthetic construct
  source 1..21: mol_type = other DNA
acgcgctacggagaaaacgct

SEQ ID NO: 35482 - DNA, 21 bp, synthetic construct
  source 1..21: mol_type = other DNA
ttctctcgggtgaattataac

SEQ ID NO: 35483 - DNA, 21 bp, synthetic construct
  source 1..21: mol_type = other DNA
ccgtggtccaccaatggtatc

SEQ ID NO: 35484 - DNA, 21 bp, synthetic construct
  source 1..21: mol_type = other DNA
cggagtgagttccatcccttt

SEQ ID NO: 35485 - DNA, 21 bp, synthetic construct
  source 1..21: mol_type = other DNA
gcgtacgccaggtctccgctg

SEQ ID NO: 35486 - DNA, 21 bp, synthetic construct
  source 1..21: mol_type = other DNA
tattcgagacacggacttaat

SEQ ID NO: 35487 - DNA, 21 bp, synthetic construct
  source 1..21: mol_type = other DNA
cgcacagtacacacgtatcct

SEQ ID NO: 35488 - DNA, 21 bp, synthetic construct
  source 1..21: mol_type = other DNA
tttcataaaatgaattacaat

SEQ ID NO: 35489 - DNA, 21 bp, synthetic construct
  source 1..21: mol_type = other DNA
tatcaatcttcaaacggcgtt

SEQ ID NO: 35490 - DNA, 21 bp, synthetic construct
  source 1..21: mol_type = other DNA
gcaggaatggaccgtggatgg

SEQ ID NO: 35491 - DNA, 21 bp, synthetic construct
  source 1..21: mol_type = other DNA
cgcggagagacctcatcttgg

SEQ ID NO: 35492 - DNA, 21 bp, synthetic construct
  source 1..21: mol_type = other DNA
cggatgtcgactaacgggatt

SEQ ID NO: 35493 - DNA, 21 bp, synthetic construct
  source 1..21: mol_type = other DNA
tactggagctcggtccgtgac

SEQ ID NO: 35494 - DNA, 21 bp, synthetic construct
  source 1..21: mol_type = other DNA
tatttttcggggcggagtttg

SEQ ID NO: 35495 - DNA, 21 bp, synthetic construct
  source 1..21: mol_type = other DNA
ggaggtcccacatgtaaattt

SEQ ID NO: 35496 - DNA, 21 bp, synthetic construct
  source 1..21: mol_type = other DNA
ttacgtaatggtacgggacct

SEQ ID NO: 35497 - DNA, 21 bp, synthetic construct
  source 1..21: mol_type = other DNA
cgcacggagttccacagtttt

SEQ ID NO: 35498 - DNA, 21 bp, synthetic construct
  source 1..21: mol_type = other DNA
tacagtcgccataatttcaac

SEQ ID NO: 35499 - DNA, 21 bp, synthetic construct
  source 1..21: mol_type = other DNA
ggttcaggtaatagtatttgg

SEQ ID NO: 35500 - DNA, 21 bp, synthetic construct
  source 1..21: mol_type = other DNA
tggtggcacggcaagcccgat

SEQ ID NO: 35501 - DNA, 21 bp, synthetic construct
  source 1..21: mol_type = other DNA
gtcgcacagaagggatgtgga

SEQ ID NO: 35502 - DNA, 21 bp, synthetic construct
  source 1..21: mol_type = other DNA
tactacagcggtcgactgtca

SEQ ID NO: 35503 - DNA, 21 bp, synthetic construct
  source 1..21: mol_type = other DNA
gtatctgatttcacgggatac

SEQ ID NO: 35504 - DNA, 21 bp, synthetic construct
  source 1..21: mol_type = other DNA
gggggtgagtatgtgagctac

SEQ ID NO: 35505 - DNA, 21 bp, synthetic construct
  source 1..21: mol_type = other DNA
ttctcacgtgcgaaccacaat

SEQ ID NO: 35506 - DNA, 21 bp, synthetic construct
  source 1..21: mol_type = other DNA
tactcgaaaaatgggtggaac

SEQ ID NO: 35507 - DNA, 21 bp, synthetic construct
  source 1..21: mol_type = other DNA
cgcgatgaattcgttagtttc

SEQ ID NO: 35508 - DNA, 21 bp, synthetic construct
  source 1..21: mol_type = other DNA
ctttggtccggcatgggccca

SEQ ID NO: 35509 - DNA, 21 bp, synthetic construct
  source 1..21: mol_type = other DNA
aaaagtgatcatgtcaggtgg

SEQ ID NO: 35510 - DNA, 21 bp, synthetic construct
  source 1..21: mol_type = other DNA
tattatagcactaatggggta

SEQ ID NO: 35511 - DNA, 21 bp, synthetic construct
  source 1..21: mol_type = other DNA
cacgactcgacgcatggtcgt

SEQ ID NO: 35512 - DNA, 21 bp, synthetic construct
  source 1..21: mol_type = other DNA
tgcaagtcggataccaggtgg

SEQ ID NO: 35513 - DNA, 21 bp, synthetic construct
  source 1..21: mol_type = other DNA
tactcgagacaaaatcacaac

SEQ ID NO: 35514 - DNA, 21 bp, synthetic construct
  source 1..21: mol_type = other DNA
tgggtacgtagtgacgtccga

SEQ ID NO: 35515 - DNA, 21 bp, synthetic construct
  source 1..21: mol_type = other DNA
acccgcgaaggggacgtccca

SEQ ID NO: 35516 - DNA, 21 bp, synthetic construct
  source 1..21: mol_type = other DNA
attcccgatacatgctgcgtt

SEQ ID NO: 35517 - DNA, 21 bp, synthetic construct
  source 1..21: mol_type = other DNA
cagatggcgtcgcaggcttgg

SEQ ID NO: 35518 - DNA, 21 bp, synthetic construct
  source 1..21: mol_type = other DNA
tactcgaaatcaaataccaat

SEQ ID NO: 35519 - DNA, 21 bp, synthetic construct
  source 1..21: mol_type = other DNA
gagctgagtagcccgaaatgg

SEQ ID NO: 35520 - DNA, 21 bp, synthetic construct
  source 1..21: mol_type = other DNA
tggtggacgggtacggtgagt

SEQ ID NO: 35521 - DNA, 21 bp, synthetic construct
  source 1..21: mol_type = other DNA
tgcaaaccacaaaccattggt

SEQ ID NO: 35522 - DNA, 21 bp, synthetic construct
  source 1..21: mol_type = other DNA
gattacgagagccggaaatgg

SEQ ID NO: 35523 - DNA, 21 bp, synthetic construct
  source 1..21: mol_type = other DNA
atgaggaacacacactgtgac

SEQ ID NO: 35524 - DNA, 21 bp, synthetic construct
  source 1..21: mol_type = other DNA
ttctctaggatgaattacaac

SEQ ID NO: 35525 - DNA, 21 bp, synthetic construct
  source 1..21: mol_type = other DNA
aatttagagtcgcataaatgg

SEQ ID NO: 35526 - DNA, 21 bp, synthetic construct
  source 1..21: mol_type = other DNA
ggaatggagcatgtacgttgg

SEQ ID NO: 35527 - DNA, 21 bp, synthetic construct
  source 1..21: mol_type = other DNA
cacgattcctcgaatggagtg

SEQ ID NO: 35528 - DNA, 21 bp, synthetic construct
  source 1..21: mol_type = other DNA
tcaggatatgatagaggttgg

SEQ ID NO: 35529 - DNA, 21 bp, synthetic construct
  source 1..21: mol_type = other DNA
aaagatgattttcagagtttc

SEQ ID NO: 35530 - DNA, 21 bp, synthetic construct
  source 1..21: mol_type = other DNA
ttctgggggggtataaaagag

SEQ ID NO: 35531 - DNA, 21 bp, synthetic construct
  source 1..21: mol_type = other DNA
tgggtttccacaaacggtgtt

SEQ ID NO: 35532 - DNA, 21 bp, synthetic construct
  source 1..21: mol_type = other DNA
acttgggacggcatgcaggct

SEQ ID NO: 35533 - DNA, 21 bp, synthetic construct
  source 1..21: mol_type = other DNA
gcaccctacgacagggggtgg

SEQ ID NO: 35534 - DNA, 21 bp, synthetic construct
  source 1..21: mol_type = other DNA
atagacgagttccgctcgtgg

SEQ ID NO: 35535 - DNA, 21 bp, synthetic construct
  source 1..21: mol_type = other DNA
cgggagaatagcgtatattgg

SEQ ID NO: 35536 - DNA, 21 bp, synthetic construct
  source 1..21: mol_type = other DNA
caatcgtctactaacggggtc

SEQ ID NO: 35537 - DNA, 21 bp, synthetic construct
  source 1..21: mol_type = other DNA
tggcagagtagcaacggggta

SEQ ID NO: 35538 - DNA, 21 bp, synthetic construct
  source 1..21: mol_type = other DNA
cgtggggattctagttattgg

SEQ ID NO: 35539 - DNA, 21 bp, synthetic construct
  source 1..21: mol_type = other DNA
tatagccgacataattctaac

SEQ ID NO: 35540 - DNA, 21 bp, synthetic construct
  source 1..21: mol_type = other DNA
ggcatcggatgcacaaagctt

SEQ ID NO: 35541 - DNA, 21 bp, synthetic construct
  source 1..21: mol_type = other DNA
atgtatgccttttccaaggag

SEQ ID NO: 35542 - DNA, 21 bp, synthetic construct
  source 1..21: mol_type = other DNA
aaagacggattgagtcgttgg

SEQ ID NO: 35543 - DNA, 21 bp, synthetic construct
  source 1..21: mol_type = other DNA
tggcctttcgggatggacgct

SEQ ID NO: 35544 - DNA, 21 bp, synthetic construct
  source 1..21: mol_type = other DNA
cgagaagacacgatatactgg

SEQ ID NO: 35545 - DNA, 21 bp, synthetic construct
  source 1..21: mol_type = other DNA
aagtttgacggcactcccagt

SEQ ID NO: 35546 - DNA, 21 bp, synthetic construct
  source 1..21: mol_type = other DNA
aaggatgaatttcaaacatat

SEQ ID NO: 35547 - DNA, 21 bp, synthetic construct
  source 1..21: mol_type = other DNA
tacgcccggggcaattttaac

SEQ ID NO: 35548 - DNA, 21 bp, synthetic construct
  source 1..21: mol_type = other DNA
ttcttcactggtgaaagggct

SEQ ID NO: 35549 - DNA, 21 bp, synthetic construct
  source 1..21: mol_type = other DNA
ggtggagaaacgagtctatgg

SEQ ID NO: 35550 - DNA, 21 bp, synthetic construct
  source 1..21: mol_type = other DNA
tattggggcggggttgtcagt

SEQ ID NO: 35551 - DNA, 21 bp, synthetic construct
  source 1..21: mol_type = other DNA
cgtggcgaattcaccagctat

SEQ ID NO: 35552 - DNA, 21 bp, synthetic construct
  source 1..21: mol_type = other DNA
cgtgatgaatttcgggcatac

SEQ ID NO: 35553 - DNA, 21 bp, synthetic construct
  source 1..21: mol_type = other DNA
ggggctaacacgtcacgttgg

SEQ ID NO: 35554 - DNA, 21 bp, synthetic construct
  source 1..21: mol_type = other DNA
gtacttgggcagggaaattgg

SEQ ID NO: 35555 - DNA, 21 bp, synthetic construct
  source 1..21: mol_type = other DNA
cctggcggaacttcaacctgg

SEQ ID NO: 35556 - DNA, 21 bp, synthetic construct
  source 1..21: mol_type = other DNA
ggctctggcactaatgcgtgg

SEQ ID NO: 35557 - DNA, 21 bp, synthetic construct
  source 1..21: mol_type = other DNA
ctctggagcggggaggcacca

SEQ ID NO: 35558 - DNA, 21 bp, synthetic construct
  source 1..21: mol_type = other DNA
ttgtggtcgggtattggcccc

SEQ ID NO: 35559 - DNA, 21 bp, synthetic construct
  source 1..21: mol_type = other DNA
gcagaatccaccaatggggtg

SEQ ID NO: 35560 - DNA, 21 bp, synthetic construct
  source 1..21: mol_type = other DNA
acctgggaaggtacggcggcc

SEQ ID NO: 35561 - DNA, 21 bp, synthetic construct
  source 1..21: mol_type = other DNA
tacgccaggcacggtcacaac

SEQ ID NO: 35562 - DNA, 21 bp, synthetic construct
  source 1..21: mol_type = other DNA
ggaggggaatcaagcatttgg

SEQ ID NO: 35563 - DNA, 21 bp, synthetic construct
  source 1..21: mol_type = other DNA
ttgtgggacggaacgcgtgcc

SEQ ID NO: 35564 - DNA, 21 bp, synthetic construct
  source 1..21: mol_type = other DNA
tgtaaagtgatctctcctcct

SEQ ID NO: 35565 - DNA, 21 bp, synthetic construct
  source 1..21: mol_type = other DNA
gacttgagggcggtctcgtgg

SEQ ID NO: 35566 - DNA, 21 bp, synthetic construct
  source 1..21: mol_type = other DNA
tggtggacgggctacgttgac

SEQ ID NO: 35567 - DNA, 21 bp, synthetic construct
  source 1..21: mol_type = other DNA
tggacccctatgtgtaaagct

SEQ ID NO: 35568 - DNA, 21 bp, synthetic construct
  source 1..21: mol_type = other DNA
aacgatggatcttcgtcatac

SEQ ID NO: 35569 - DNA, 21 bp, synthetic construct
  source 1..21: mol_type = other DNA
tactttgcaggtcgattggca

SEQ ID NO: 35570 - DNA, 21 bp, synthetic construct
  source 1..21: mol_type = other DNA
tactggtctggaactaatgct

SEQ ID NO: 35571 - DNA, 21 bp, synthetic construct
  source 1..21: mol_type = other DNA
cgttctgaattccgtacgtac

SEQ ID NO: 35572 - DNA, 21 bp, synthetic construct
  source 1..21: mol_type = other DNA
ttttggaccggtatccccgat

SEQ ID NO: 35573 - DNA, 21 bp, synthetic construct
  source 1..21: mol_type = other DNA
aaatatgacggcactagcgct

SEQ ID NO: 35574 - DNA, 21 bp, synthetic construct
  source 1..21: mol_type = other DNA
ggtggtgctggggtcaggtgg

SEQ ID NO: 35575 - DNA, 21 bp, synthetic construct
  source 1..21: mol_type = other DNA
tacgcaagacatgggtataac

SEQ ID NO: 35576 - DNA, 21 bp, synthetic construct
  source 1..21: mol_type = other DNA
tgccgggatgtgaagcaaggg

SEQ ID NO: 35577 - DNA, 21 bp, synthetic construct
  source 1..21: mol_type = other DNA
agaggagagtttcatagctac

SEQ ID NO: 35578 - DNA, 21 bp, synthetic construct
  source 1..21: mol_type = other DNA
tgtaagatgtcgtgcgccgag

SEQ ID NO: 35579 - DNA, 21 bp, synthetic construct
  source 1..21: mol_type = other DNA
ttgaattcaacaaatgggatc

SEQ ID NO: 35580 - DNA, 21 bp, synthetic construct
  source 1..21: mol_type = other DNA
gagatggaaagtgtccgctgg

SEQ ID NO: 35581 - DNA, 21 bp, synthetic construct
  source 1..21: mol_type = other DNA
tgttcgaagcgcccttgcggg

SEQ ID NO: 35582 - DNA, 21 bp, synthetic construct
  source 1..21: mol_type = other DNA
cgtatcacccacccatactcc

SEQ ID NO: 35583 - DNA, 21 bp, synthetic construct
  source 1..21: mol_type = other DNA
tatgcacgtcatgggcataat

SEQ ID NO: 35584 - DNA, 21 bp, synthetic construct
  source 1..21: mol_type = other DNA
tattggagctccgtccgcgaa

SEQ ID NO: 35585 - DNA, 21 bp, synthetic construct
  source 1..21: mol_type = other DNA
ctctggaccggcgtgggcccc

SEQ ID NO: 35586 - DNA, 21 bp, synthetic construct
  source 1..21: mol_type = other DNA
ggggggaacggcagctcgtgg

SEQ ID NO: 35587 - DNA, 21 bp, synthetic construct
  source 1..21: mol_type = other DNA
agagacgaaacctcattttgg

SEQ ID NO: 35588 - DNA, 21 bp, synthetic construct
  source 1..21: mol_type = other DNA
acagtttggggagacccggct

SEQ ID NO: 35589 - DNA, 21 bp, synthetic construct
  source 1..21: mol_type = other DNA
cgtggtgaatcggtaaggtgg

SEQ ID NO: 35590 - DNA, 21 bp, synthetic construct
  source 1..21: mol_type = other DNA
ttatggagtggaatggggcct

SEQ ID NO: 35591 - DNA, 21 bp, synthetic construct
  source 1..21: mol_type = other DNA
tactcacgattgaaccacaat

SEQ ID NO: 35592 - DNA, 21 bp, synthetic construct
  source 1..21: mol_type = other DNA
ttctggtccgggcaacgtgat

SEQ ID NO: 35593 - DNA, 21 bp, synthetic construct
  source 1..21: mol_type = other DNA
acttggaatggagataatgcc

SEQ ID NO: 35594 - DNA, 21 bp, synthetic construct
  source 1..21: mol_type = other DNA
gatatgggaggatatgattgg

SEQ ID NO: 35595 - DNA, 21 bp, synthetic construct
  source 1..21: mol_type = other DNA
cctttgagagattgtgttaag

SEQ ID NO: 35596 - DNA, 21 bp, synthetic construct
  source 1..21: mol_type = other DNA
tactggtctagtgtaagagag

SEQ ID NO: 35597 - DNA, 21 bp, synthetic construct
  source 1..21: mol_type = other DNA
gttgatgactttaaggttttt

SEQ ID NO: 35598 - DNA, 21 bp, synthetic construct
  source 1..21: mol_type = other DNA
cttaaggatggtaccgcatct

SEQ ID NO: 35599 - DNA, 21 bp, synthetic construct
  source 1..21: mol_type = other DNA
aacttggcctccgctggttgg

SEQ ID NO: 35600 - DNA, 21 bp, synthetic construct
  source 1..21: mol_type = other DNA
ataccggaacgctgccccaaa

SEQ ID NO: 35601 - DNA, 21 bp, synthetic construct
  source 1..21: mol_type = other DNA
tgtaaacctaagcagatagag

SEQ ID NO: 35602 - DNA, 21 bp, synthetic construct
  source 1..21: mol_type = other DNA
cggatggactcggtttcatgg

SEQ ID NO: 35603 - DNA, 21 bp, synthetic construct
  source 1..21: mol_type = other DNA
atgttgtcaagtaatacttgg

SEQ ID NO: 35604 - DNA, 21 bp, synthetic construct
  source 1..21: mol_type = other DNA
acgaaactcggggataatgct

SEQ ID NO: 35605 - DNA, 21 bp, synthetic construct
  source 1..21: mol_type = other DNA
tattcgcgggacgggtgtaac

SEQ ID NO: 35606 - DNA, 21 bp, synthetic construct
  source 1..21: mol_type = other DNA
cgtatggaagacgtatattgg

SEQ ID NO: 35607 - DNA, 21 bp, synthetic construct
  source 1..21: mol_type = other DNA
ttaatggatgggaccagtgct

SEQ ID NO: 35608 - DNA, 21 bp, synthetic construct
  source 1..21: mol_type = other DNA
cgcgacgagtatatgagttgg

SEQ ID NO: 35609 - DNA, 21 bp, synthetic construct
  source 1..21: mol_type = other DNA
aaatgggacggcactagcgct

SEQ ID NO: 35610 - DNA, 21 bp, synthetic construct
  source 1..21: mol_type = other DNA
aactcggagtttatgagctat

SEQ ID NO: 35611 - DNA, 21 bp, synthetic construct
  source 1..21: mol_type = other DNA
ggctgtggcactaagtatggc

SEQ ID NO: 35612 - DNA, 21 bp, synthetic construct
  source 1..21: mol_type = other DNA
agaacgccgacttgttacgga

SEQ ID NO: 35613 - DNA, 21 bp, synthetic construct
  source 1..21: mol_type = other DNA
acctggactggtgatataccg

SEQ ID NO: 35614 - DNA, 21 bp, synthetic construct
  source 1..21: mol_type = other DNA
aagtgggatggaacatctgca

SEQ ID NO: 35615 - DNA, 21 bp, synthetic construct
  source 1..21: mol_type = other DNA
tactcgcggtacaatgtgaac

SEQ ID NO: 35616 - DNA, 21 bp, synthetic construct
  source 1..21: mol_type = other DNA
attccaccgttataccaggta

SEQ ID NO: 35617 - DNA, 21 bp, synthetic construct
  source 1..21: mol_type = other DNA
agaggtgacagctcgtactgg

SEQ ID NO: 35618 - DNA, 21 bp, synthetic construct
  source 1..21: mol_type = other DNA
tacgtcaagtgggacagcggg

SEQ ID NO: 35619 - DNA, 21 bp, synthetic construct
  source 1..21: mol_type = other DNA
cgcttatatgatgcgtatcag

SEQ ID NO: 35620 - DNA, 21 bp, synthetic construct
  source 1..21: mol_type = other DNA
tggtggtcgggcactgccgcc

SEQ ID NO: 35621 - DNA, 21 bp, synthetic construct
  source 1..21: mol_type = other DNA
acatgggagggtgagggtccc

SEQ ID NO: 35622 - DNA, 21 bp, synthetic construct
  source 1..21: mol_type = other DNA
aagtacgatgggacatctgcg

SEQ ID NO: 35623 - DNA, 21 bp, synthetic construct
  source 1..21: mol_type = other DNA
tattctcgtggtaactttaac

SEQ ID NO: 35624 - DNA, 21 bp, synthetic construct
  source 1..21: mol_type = other DNA
tatttcgatggcacgcctgca

SEQ ID NO: 35625 - DNA, 21 bp, synthetic construct
  source 1..21: mol_type = other DNA
aaggacgaattccgtgcttat

SEQ ID NO: 35626 - DNA, 21 bp, synthetic construct
  source 1..21: mol_type = other DNA
acgagggatggaaccaatgcg

SEQ ID NO: 35627 - DNA, 21 bp, synthetic construct
  source 1..21: mol_type = other DNA
agagacgagacctcgttttgg

SEQ ID NO: 35628 - DNA, 21 bp, synthetic construct
  source 1..21: mol_type = other DNA
tatagccgatttaacattaac

SEQ ID NO: 35629 - DNA, 21 bp, synthetic construct
  source 1..21: mol_type = other DNA
tactataccggccaaatcgat

SEQ ID NO: 35630 - DNA, 21 bp, synthetic construct
  source 1..21: mol_type = other DNA
gattataccgggcggattgcc

SEQ ID NO: 35631 - DNA, 21 bp, synthetic construct
  source 1..21: mol_type = other DNA
gggtcgggcacggcgaagtgg

SEQ ID NO: 35632 - DNA, 21 bp, synthetic construct
  source 1..21: mol_type = other DNA
gatatgggttcaaacacgtgg

SEQ ID NO: 35633 - DNA, 21 bp, synthetic construct
  source 1..21: mol_type = other DNA
tataatcccggctgtaaggag

SEQ ID NO: 35634 - DNA, 21 bp, synthetic construct
  source 1..21: mol_type = other DNA
ttgttctcagggatgggacct

SEQ ID NO: 35635 - DNA, 21 bp, synthetic construct
  source 1..21: mol_type = other DNA
ggaggcggagtgagcaggtgg

SEQ ID NO: 35636 - DNA, 21 bp, synthetic construct
  source 1..21: mol_type = other DNA
agggatgaaggaacgtactgg

SEQ ID NO: 35637 - DNA, 21 bp, synthetic construct
  source 1..21: mol_type = other DNA
acatgggagggaacagctgct

SEQ ID NO: 35638 - DNA, 21 bp, synthetic construct
  source 1..21: mol_type = other DNA
aaattcgatgggacaccttcg

SEQ ID NO: 35639 - DNA, 21 bp, synthetic construct
  source 1..21: mol_type = other DNA
aaggtagagcacgtccggtgg

SEQ ID NO: 35640 - DNA, 21 bp, synthetic construct
  source 1..21: mol_type = other DNA
tatagcaggtatggacagaac

SEQ ID NO: 35641 - DNA, 21 bp, synthetic construct
  source 1..21: mol_type = other DNA
gattggacgggtaatgccgca

SEQ ID NO: 35642 - DNA, 21 bp, synthetic construct
  source 1..21: mol_type = other DNA
ataccccccctttatcaagtc

SEQ ID NO: 35643 - DNA, 21 bp, synthetic construct
  source 1..21: mol_type = other DNA
agagacgaatttagaccgtgg

SEQ ID NO: 35644 - DNA, 21 bp, synthetic construct
  source 1..21: mol_type = other DNA
acgcgagagggtgatgtaccg

SEQ ID NO: 35645 - DNA, 21 bp, synthetic construct
  source 1..21: mol_type = other DNA
tactcgcggttaggttataat

SEQ ID NO: 35646 - DNA, 21 bp, synthetic construct
  source 1..21: mol_type = other DNA
tcgatgcaagaccgtatttgg

SEQ ID NO: 35647 - DNA, 21 bp, synthetic construct
  source 1..21: mol_type = other DNA
cggagcgagtttaggacatat

SEQ ID NO: 35648 - DNA, 21 bp, synthetic construct
  source 1..21: mol_type = other DNA
tatagtaagtatggcttcaat

SEQ ID NO: 35649 - DNA, 21 bp, synthetic construct
  source 1..21: mol_type = other DNA
gattggtatggaaatgcggca

SEQ ID NO: 35650 - DNA, 21 bp, synthetic construct
  source 1..21: mol_type = other DNA
tactcgtatgcaggtggcgga

SEQ ID NO: 35651 - DNA, 21 bp, synthetic construct
  source 1..21: mol_type = other DNA
ataccggacacgtgttgtgtc

SEQ ID NO: 35652 - DNA, 21 bp, synthetic construct
  source 1..21: mol_type = other DNA
atgagggacggaaccatagct

SEQ ID NO: 35653 - DNA, 21 bp, synthetic construct
  source 1..21: mol_type = other DNA
attgaacgccgtggctgggac

SEQ ID NO: 35654 - DNA, 21 bp, synthetic construct
  source 1..21: mol_type = other DNA
tacgagcctggctgcaagccg

SEQ ID NO: 35655 - DNA, 21 bp, synthetic construct
  source 1..21: mol_type = other DNA
ttcttcagcactaatggagtt

SEQ ID NO: 35656 - DNA, 21 bp, synthetic construct
  source 1..21: mol_type = other DNA
attccctccaagtgcccgttc

SEQ ID NO: 35657 - DNA, 21 bp, synthetic construct
  source 1..21: mol_type = other DNA
ttatggagcggagagaacgct

SEQ ID NO: 35658 - DNA, 21 bp, synthetic construct
  source 1..21: mol_type = other DNA
tgcaaggactctgcccgtttg

SEQ ID NO: 35659 - DNA, 21 bp, synthetic construct
  source 1..21: mol_type = other DNA
tattggcatggcaagccggaa

SEQ ID NO: 35660 - DNA, 21 bp, synthetic construct
  source 1..21: mol_type = other DNA
acgagatggggagatgaggct

SEQ ID NO: 35661 - DNA, 21 bp, synthetic construct
  source 1..21: mol_type = other DNA
atgcgggatgggtccaacgcg

SEQ ID NO: 35662 - DNA, 21 bp, synthetic construct
  source 1..21: mol_type = other DNA
ggcggagagagtagcgtctgg

SEQ ID NO: 35663 - DNA, 21 bp, synthetic construct
  source 1..21: mol_type = other DNA
gcatatgcgcgtagcccatta

SEQ ID NO: 35664 - DNA, 21 bp, synthetic construct
  source 1..21: mol_type = other DNA
gtcgacgatttcaaagtattc

SEQ ID NO: 35665 - DNA, 21 bp, synthetic construct
  source 1..21: mol_type = other DNA
ggaggagccacaagtagatgg

SEQ ID NO: 35666 - DNA, 21 bp, synthetic construct
  source 1..21: mol_type = other DNA
cgtatgagtagcggtgtgtgg

SEQ ID NO: 35667 - DNA, 21 bp, synthetic construct
  source 1..21: mol_type = other DNA
cgggatgacttccaccccttt

SEQ ID NO: 35668 - DNA, 21 bp, synthetic construct
  source 1..21: mol_type = other DNA
tttggtcctcccacacctgac

SEQ ID NO: 35669 - DNA, 21 bp, synthetic construct
  source 1..21: mol_type = other DNA
tactttgacggtaccccggct

SEQ ID NO: 35670 - DNA, 21 bp, synthetic construct
  source 1..21: mol_type = other DNA
ctttttgacggaacttacgcg

SEQ ID NO: 35671 - DNA, 21 bp, synthetic construct
  source 1..21: mol_type = other DNA
atgtggaacggcacaccttca

SEQ ID NO: 35672 - DNA, 21 bp, synthetic construct
  source 1..21: mol_type = other DNA
ttcacgccaatgtgcaaagcg

SEQ ID NO: 35673 - DNA, 21 bp, synthetic construct
  source 1..21: mol_type = other DNA
tactggagtggacagcaggcc

SEQ ID NO: 35674 - DNA, 21 bp, synthetic construct
  source 1..21: mol_type = other DNA
ttcttcagcggtagacacgag

SEQ ID NO: 35675 - DNA, 21 bp, synthetic construct
  source 1..21: mol_type = other DNA
ctattcagtggcatgggccca

SEQ ID NO: 35676 - DNA, 21 bp, synthetic construct
  source 1..21: mol_type = other DNA
atgtgggatggaacatttgct

SEQ ID NO: 35677 - DNA, 21 bp, synthetic construct
  source 1..21: mol_type = other DNA
tattttgcaggtgtcgttagc

SEQ ID NO: 35678 - DNA, 21 bp, synthetic construct
  source 1..21: mol_type = other DNA
agatccgagttcacgccatat

SEQ ID NO: 35679 - DNA, 21 bp, synthetic construct
  source 1..21: mol_type = other DNA
aaggaggacttcttgtcatgg

SEQ ID NO: 35680 - DNA, 21 bp, synthetic construct
  source 1..21: mol_type = other DNA
gattggcatgggctcatcgcg

SEQ ID NO: 35681 - DNA, 21 bp, synthetic construct
  source 1..21: mol_type = other DNA
cgtcttgattcagctaactgg

SEQ ID NO: 35682 - DNA, 21 bp, synthetic construct
  source 1..21: mol_type = other DNA
acccgctggggggacgaagcg

SEQ ID NO: 35683 - DNA, 21 bp, synthetic construct
  source 1..21: mol_type = other DNA
tatttcacaggattgcacaac

SEQ ID NO: 35684 - DNA, 21 bp, synthetic construct
  source 1..21: mol_type = other DNA
tgtaagccgcggcaaggcgag

SEQ ID NO: 35685 - DNA, 21 bp, synthetic construct
  source 1..21: mol_type = other DNA
atgcgcgatgggactatcgcg

SEQ ID NO: 35686 - DNA, 21 bp, synthetic construct
  source 1..21: mol_type = other DNA
gacatgaggatgggtacctgg

SEQ ID NO: 35687 - DNA, 21 bp, synthetic construct
  source 1..21: mol_type = other DNA
cgcgaagaccacacgtattgg

SEQ ID NO: 35688 - DNA, 21 bp, synthetic construct
  source 1..21: mol_type = other DNA
gaactcggaagtcacacctgg

SEQ ID NO: 35689 - DNA, 21 bp, synthetic construct
  source 1..21: mol_type = other DNA
gaaatggagtcgacgaagtgg

SEQ ID NO: 35690 - DNA, 21 bp, synthetic construct
  source 1..21: mol_type = other DNA
tataacgcgggtcgcgagtgc

SEQ ID NO: 35691 - DNA, 21 bp, synthetic construct
  source 1..21: mol_type = other DNA
cgcgacgattttcgcacgtgg

SEQ ID NO: 35692 - DNA, 21 bp, synthetic construct
  source 1..21: mol_type = other DNA
ctttggtcgggcgaaaatgca

SEQ ID NO: 35693 - DNA, 21 bp, synthetic construct
  source 1..21: mol_type = other DNA
tactactctacaaacggggtc

SEQ ID NO: 35694 - DNA, 21 bp, synthetic construct
  source 1..21: mol_type = other DNA
atcggggagcgcggttgggac

SEQ ID NO: 35695 - DNA, 21 bp, synthetic construct
  source 1..21: mol_type = other DNA
cgggatgagtttcggggatgg

SEQ ID NO: 35696 - DNA, 21 bp, synthetic construct
  source 1..21: mol_type = other DNA
ttcgatggagcgagccgttgg

SEQ ID NO: 35697 - DNA, 21 bp, synthetic construct
  source 1..21: mol_type = other DNA
ggcgacgacttcgtacgttgg

SEQ ID NO: 35698 - DNA, 21 bp, synthetic construct
  source 1..21: mol_type = other DNA
ggttcggagttccacacgtgg

SEQ ID NO: 35699 - DNA, 21 bp, synthetic construct
  source 1..21: mol_type = other DNA
acctgggatggcacgccagca

SEQ ID NO: 35700 - DNA, 21 bp, synthetic construct
  source 1..21: mol_type = other DNA
aaagacgattactctggatat

SEQ ID NO: 35701 - DNA, 21 bp, synthetic construct
  source 1..21: mol_type = other DNA
aaaagtgactggactccctac

SEQ ID NO: 35702 - DNA, 21 bp, synthetic construct
  source 1..21: mol_type = other DNA
aagggggacttttctacctgg

SEQ ID NO: 35703 - DNA, 21 bp, synthetic construct
  source 1..21: mol_type = other DNA
cttagaagtgggatgggtccc

SEQ ID NO: 35704 - DNA, 21 bp, synthetic construct
  source 1..21: mol_type = other DNA
tggtggtcgagcatcaaggag

SEQ ID NO: 35705 - DNA, 21 bp, synthetic construct
  source 1..21: mol_type = other DNA
ttgtggagtggtgtcggtcca

SEQ ID NO: 35706 - DNA, 21 bp, synthetic construct
  source 1..21: mol_type = other DNA
cgtagagatggaaccagcgct

SEQ ID NO: 35707 - DNA, 21 bp, synthetic construct
  source 1..21: mol_type = other DNA
tgggatcccatgtgtaaggca

SEQ ID NO: 35708 - DNA, 21 bp, synthetic construct
  source 1..21: mol_type = other DNA
cgttcggagttcacagcattt

SEQ ID NO: 35709 - DNA, 21 bp, synthetic construct
  source 1..21: mol_type = other DNA
atcgatgaatttaggagttgg

SEQ ID NO: 35710 - DNA, 21 bp, synthetic construct
  source 1..21: mol_type = other DNA
cgggaggaaacatcgagttgg

SEQ ID NO: 35711 - DNA, 21 bp, synthetic construct
  source 1..21: mol_type = other DNA
cttcatgtacagggcccaaat

SEQ ID NO: 35712 - DNA, 21 bp, synthetic construct
  source 1..21: mol_type = other DNA
ttatgggatggcacacctaga

SEQ ID NO: 35713 - DNA, 21 bp, synthetic construct
  source 1..21: mol_type = other DNA
aatatggcgagtgcgggttgg

SEQ ID NO: 35714 - DNA, 21 bp, synthetic construct
  source 1..21: mol_type = other DNA
tttcctccgttgtttgcagcg

SEQ ID NO: 35715 - DNA, 21 bp, synthetic construct
  source 1..21: mol_type = other DNA
agacgtgacggaacttcagcc

SEQ ID NO: 35716 - DNA, 21 bp, synthetic construct
  source 1..21: mol_type = other DNA
gactggaccgggaacgctgct

SEQ ID NO: 35717 - DNA, 21 bp, synthetic construct
  source 1..21: mol_type = other DNA
ttagccaccggtgatggacct

SEQ ID NO: 35718 - DNA, 21 bp, synthetic construct
  source 1..21: mol_type = other DNA
tacagccgccacgggacgaat

SEQ ID NO: 35719 - DNA, 21 bp, synthetic construct
  source 1..21: mol_type = other DNA
ataatggcaacgagtacttgg

SEQ ID NO: 35720 - DNA, 21 bp, synthetic construct
  source 1..21: mol_type = other DNA
acctacgacgggaccgctgca

SEQ ID NO: 35721 - DNA, 21 bp, synthetic construct
  source 1..21: mol_type = other DNA
ctttgggatggctccgcgagt

SEQ ID NO: 35722 - DNA, 21 bp, synthetic construct
  source 1..21: mol_type = other DNA
aaagatgaatacatggtatgg

SEQ ID NO: 35723 - DNA, 21 bp, synthetic construct
  source 1..21: mol_type = other DNA
acatgggaaggaactccagcg

SEQ ID NO: 35724 - DNA, 21 bp, synthetic construct
  source 1..21: mol_type = other DNA
atgagagacggcagtaatgcc

SEQ ID NO: 35725 - DNA, 21 bp, synthetic construct
  source 1..21: mol_type = other DNA
ctaagggatggctccccaccc

SEQ ID NO: 35726 - DNA, 21 bp, synthetic construct
  source 1..21: mol_type = other DNA
atgacaagcaccaacggagtt

SEQ ID NO: 35727 - DNA, 21 bp, synthetic construct
  source 1..21: mol_type = other DNA
agagacgaattcaggggctgg

SEQ ID NO: 35728 - DNA, 21 bp, synthetic construct
  source 1..21: mol_type = other DNA
tacgatgttggtacttggtcg

SEQ ID NO: 35729 - DNA, 21 bp, synthetic construct
  source 1..21: mol_type = other DNA
agagacgattttcatccgttc

SEQ ID NO: 35730 - DNA, 21 bp, synthetic construct
  source 1..21: mol_type = other DNA
acgtatgatggcacagcggcg

SEQ ID NO: 35731 - DNA, 21 bp, synthetic construct
  source 1..21: mol_type = other DNA
acctgggaagggactaatgca

SEQ ID NO: 35732 - DNA, 21 bp, synthetic construct
  source 1..21: mol_type = other DNA
tatgcccggcacggctacaat

SEQ ID NO: 35733 - DNA, 21 bp, synthetic construct
  source 1..21: mol_type = other DNA
tacagcaagtggaacccaaac

SEQ ID NO: 35734 - DNA, 21 bp, synthetic construct
  source 1..21: mol_type = other DNA
gacttcttcggacacgacgcg

SEQ ID NO: 35735 - DNA, 21 bp, synthetic construct
  source 1..21: mol_type = other DNA
caagatggctactccaggtgg

SEQ ID NO: 35736 - DNA, 21 bp, synthetic construct
  source 1..21: mol_type = other DNA
tattttactaatcaaataaat

SEQ ID NO: 35737 - DNA, 21 bp, synthetic construct
  source 1..21: mol_type = other DNA
gacatgggaagcaatacttgg

SEQ ID NO: 35738 - DNA, 21 bp, synthetic construct
  source 1..21: mol_type = other DNA
acgtggtccggcgaaaacgcg

SEQ ID NO: 35739 - DNA, 21 bp, synthetic construct
  source 1..21: mol_type = other DNA
aaatttgatggcacatctgca

SEQ ID NO: 35740 - DNA, 21 bp, synthetic construct
  source 1..21: mol_type = other DNA
ttaatggatggtacgaatgcc

SEQ ID NO: 35741 - DNA, 21 bp, synthetic construct
  source 1..21: mol_type = other DNA
ataggtggccgctgtccacca

SEQ ID NO: 35742 - DNA, 21 bp, synthetic construct
  source 1..21: mol_type = other DNA
accgtatggggggatcctgca

SEQ ID NO: 35743 - DNA, 21 bp, synthetic construct
  source 1..21: mol_type = other DNA
gtctcgggtggcactgctggt

SEQ ID NO: 35744 - DNA, 21 bp, synthetic construct
  source 1..21: mol_type = other DNA
cgtgctgaagcggtgagatgg

SEQ ID NO: 35745 - DNA, 21 bp, synthetic construct
  source 1..21: mol_type = other DNA
acatgggatggaatgcaagcg

SEQ ID NO: 35746 - DNA, 21 bp, synthetic construct
  source 1..21: mol_type = other DNA
aagttcgacggtactagcgcg

SEQ ID NO: 35747 - DNA, 21 bp, synthetic construct
  source 1..21: mol_type = other DNA
ggagatgagtacattatgtac

SEQ ID NO: 35748 - DNA, 21 bp, synthetic construct
  source 1..21: mol_type = other DNA
ttatgggacggcactttgcgc

SEQ ID NO: 35749 - DNA, 21 bp, synthetic construct
  source 1..21: mol_type = other DNA
aaggatggcttctcaatctat

SEQ ID NO: 35750 - DNA, 21 bp, synthetic construct
  source 1..21: mol_type = other DNA
gacatgcgaagtccgaactgg

SEQ ID NO: 35751 - DNA, 21 bp, synthetic construct
  source 1..21: mol_type = other DNA
acctggagcggagagaacgct

SEQ ID NO: 35752 - DNA, 21 bp, synthetic construct
  source 1..21: mol_type = other DNA
cgtgacgaggccagcgcgtgg

SEQ ID NO: 35753 - DNA, 21 bp, synthetic construct
  source 1..21: mol_type = other DNA
ggaggagaatcatcgatgtgg

SEQ ID NO: 35754 - DNA, 21 bp, synthetic construct
  source 1..21: mol_type = other DNA
tattttacccgccaggtcaat

SEQ ID NO: 35755 - DNA, 21 bp, synthetic construct
  source 1..21: mol_type = other DNA
ctctgggacggcacgcctcgc

SEQ ID NO: 35756 - DNA, 21 bp, synthetic construct
  source 1..21: mol_type = other DNA
actaaatatggcgatcccagc

SEQ ID NO: 35757 - DNA, 21 bp, synthetic construct
  source 1..21: mol_type = other DNA
ctctgggacgggacgccacgt

SEQ ID NO: 35758 - DNA, 21 bp, synthetic construct
  source 1..21: mol_type = other DNA
atgcgagatggcactacggct

SEQ ID NO: 35759 - DNA, 21 bp, synthetic construct
  source 1..21: mol_type = other DNA
ttgaaagacggaactgctagt

SEQ ID NO: 35760 - DNA, 21 bp, synthetic construct
  source 1..21: mol_type = other DNA
atgagggatggaacggatgcc

SEQ ID NO: 35761 - DNA, 21 bp, synthetic construct
  source 1..21: mol_type = other DNA
atgagagatggcacaagggcc

SEQ ID NO: 35762 - DNA, 21 bp, synthetic construct
  source 1..21: mol_type = other DNA
acaaagtacggggacccatcg

SEQ ID NO: 35763 - DNA, 21 bp, synthetic construct
  source 1..21: mol_type = other DNA
ttatttgatggaacaatacct

SEQ ID NO: 35764 - DNA, 21 bp, synthetic construct
  source 1..21: mol_type = other DNA
ttgaggaacggaaacccggcg

SEQ ID NO: 35765 - DNA, 21 bp, synthetic construct
  source 1..21: mol_type = other DNA
gacttgagatcgagtgactgg

SEQ ID NO: 35766 - DNA, 21 bp, synthetic construct
  source 1..21: mol_type = other DNA
gactacacaggtcgaatagct

SEQ ID NO: 35767 - DNA, 21 bp, synthetic construct
  source 1..21: mol_type = other DNA
ttgagggacgggacgcgtgct

SEQ ID NO: 35768 - DNA, 21 bp, synthetic construct
  source 1..21: mol_type = other DNA
actcgattcggggatccaagt

SEQ ID NO: 35769 - DNA, 21 bp, synthetic construct
  source 1..21: mol_type = other DNA
acgtgggaggggacgcctgct

SEQ ID NO: 35770 - DNA, 21 bp, synthetic construct
  source 1..21: mol_type = other DNA
ttatgggatggaactgttgcc

SEQ ID NO: 35771 - DNA, 21 bp, synthetic construct
  source 1..21: mol_type = other DNA
gcgtttgatggaaccagtgcg

SEQ ID NO: 35772 - DNA, 21 bp, synthetic construct
  source 1..21: mol_type = other DNA
gattttttcgggcatgatgct

SEQ ID NO: 35773 - DNA, 21 bp, synthetic construct
  source 1..21: mol_type = other DNA
ttatgggatggtacacccagg

SEQ ID NO: 35774 - DNA, 21 bp, synthetic construct
  source 1..21: mol_type = other DNA
atgcgtgacggaacgcgagct

SEQ ID NO: 35775 - DNA, 21 bp, synthetic construct
  source 1..21: mol_type = other DNA
ctccgcgatggcaccagggca

SEQ ID NO: 35776 - DNA, 21 bp, synthetic construct
  source 1..21: mol_type = other DNA
cttatggacggaaccaacgcg

SEQ ID NO: 35777 - DNA, 21 bp, synthetic construct
  source 1..21: mol_type = other DNA
acatgggacgggacccccgct

SEQ ID NO: 35778 - DNA, 21 bp, synthetic construct
  source 1..21: mol_type = other DNA
atgtttgacggtagcagtgca

SEQ ID NO: 35779 - DNA, 21 bp, synthetic construct
  source 1..21: mol_type = other DNA
atgtgggatggcacgcatgca

SEQ ID NO: 35780 - DNA, 21 bp, synthetic construct
  source 1..21: mol_type = other DNA
ataccacccctgttcgaggtc

SEQ ID NO: 35781 - DNA, 21 bp, synthetic construct
  source 1..21: mol_type = other DNA
ctctgtaaaccctgcctcaag

SEQ ID NO: 35782 - DNA, 21 bp, synthetic construct
  source 1..21: mol_type = other DNA
tattttaccggagtcgttgct

SEQ ID NO: 35783 - DNA, 21 bp, synthetic construct
  source 1..21: mol_type = other DNA
atgagggacggaacaaccgcg

SEQ ID NO: 35784 - DNA, 21 bp, synthetic construct
  source 1..21: mol_type = other DNA
ctctgtcggccctgttcctac

SEQ ID NO: 35785 - DNA, 21 bp, synthetic construct
  source 1..21: mol_type = other DNA
ttgttcgacggcaccgtggct

SEQ ID NO: 35786 - DNA, 21 bp, synthetic construct
  source 1..21: mol_type = other DNA
tgtaaaagccagacttgttgt

SEQ ID NO: 35787 - DNA, 21 bp, synthetic construct
  source 1..21: mol_type = other DNA
tgtaagcgcgggtggagcgag

SEQ ID NO: 35788 - DNA, 21 bp, synthetic construct
  source 1..21: mol_type = other DNA
tgcgcgttgtatttacacgaa

SEQ ID NO: 35789 - DNA, 21 bp, synthetic construct
  source 1..21: mol_type = other DNA
gagaggatgaactgtcattcg

SEQ ID NO: 35790 - DNA, 21 bp, synthetic construct
  source 1..21: mol_type = other DNA
tatgtcaagtctcaaaagctt

SEQ ID NO: 35791 - DNA, 21 bp, synthetic construct
  source 1..21: mol_type = other DNA
tgtgcaccctacgagcacgag

SEQ ID NO: 35792 - DNA, 21 bp, synthetic construct
  source 1..21: mol_type = other DNA
cgcgaagaatatatgccattt

SEQ ID NO: 35793 - DNA, 21 bp, synthetic construct
  source 1..21: mol_type = other DNA
ctgtgtaaaccttgcttgttt

SEQ ID NO: 35794 - DNA, 21 bp, synthetic construct
  source 1..21: mol_type = other DNA
tatagttgtaacagcgataat

SEQ ID NO: 35795 - DNA, 21 bp, synthetic construct
  source 1..21: mol_type = other DNA
tgcgccccggacccacgcgaa

SEQ ID NO: 35796 - DNA, 21 bp, synthetic construct
  source 1..21: mol_type = other DNA
taccataaattaaatccgttt

SEQ ID NO: 35797 - DNA, 21 bp, synthetic construct
  source 1..21: mol_type = other DNA
ttatgcaagccatgcctcttc

SEQ ID NO: 35798 - DNA, 21 bp, synthetic construct
  source 1..21: mol_type = other DNA
atggaatctacgaacggtcgc

SEQ ID NO: 35799 - DNA, 21 bp, synthetic construct
  source 1..21: mol_type = other DNA
cgcgatgaatattctccctgg

SEQ ID NO: 35800 - DNA, 21 bp, synthetic construct
  source 1..21: mol_type = other DNA
atatgttcaaaattacagccc

SEQ ID NO: 35801 - DNA, 21 bp, synthetic construct
  source 1..21: mol_type = other DNA
atttgtgcgagccgattaagc

SEQ ID NO: 35802 - DNA, 21 bp, synthetic construct
  source 1..21: mol_type = other DNA
gaagacggtagttgtaaagcg

SEQ ID NO: 35803 - DNA, 21 bp, synthetic construct
  source 1..21: mol_type = other DNA
aaaaacaattgtacctttgga

SEQ ID NO: 35804 - DNA, 21 bp, synthetic construct
  source 1..21: mol_type = other DNA
aattgtaactttgtcgggaag

SEQ ID NO: 35805 - DNA, 21 bp, synthetic construct
  source 1..21: mol_type = other DNA
ttttcatgtgtaaccggttcg

SEQ ID NO: 35806 - DNA, 21 bp, synthetic construct
  source 1..21: mol_type = other DNA
ctctgtaagcctcatcttaca

SEQ ID NO: 35807 - DNA, 21 bp, synthetic construct
  source 1..21: mol_type = other DNA
tgtgcgccacagttgcacgag

SEQ ID NO: 35808 - DNA, 21 bp, synthetic construct
  source 1..21: mol_type = other DNA
tgtaagaggggggcgatgtca

SEQ ID NO: 35809 - DNA, 21 bp, synthetic construct
  source 1..21: mol_type = other DNA
agaacatacgattgcatagga

SEQ ID NO: 35810 - DNA, 21 bp, synthetic construct
  source 1..21: mol_type = other DNA
ttgcaccggttacttcctaat

SEQ ID NO: 35811 - DNA, 21 bp, synthetic construct
  source 1..21: mol_type = other DNA
tatcatcgcctggaccctgat

SEQ ID NO: 35812 - DNA, 21 bp, synthetic construct
  source 1..21: mol_type = other DNA
aaatttgataattgcggatcc

SEQ ID NO: 35813 - DNA, 21 bp, synthetic construct
  source 1..21: mol_type = other DNA
cgaaactgtgaagtcggaccc

SEQ ID NO: 35814 - DNA, 21 bp, synthetic construct
  source 1..21: mol_type = other DNA
ctctgcaaaggctgccttact

SEQ ID NO: 35815 - DNA, 21 bp, synthetic construct
  source 1..21: mol_type = other DNA
ttatgtagaccttgctcactg

SEQ ID NO: 35816 - DNA, 21 bp, synthetic construct
  source 1..21: mol_type = other DNA
aagttttgtaacaccggaagc

SEQ ID NO: 35817 - DNA, 21 bp, synthetic construct
  source 1..21: mol_type = other DNA
tgggcgccgatgtgcaaagca

SEQ ID NO: 35818 - DNA, 21 bp, synthetic construct
  source 1..21: mol_type = other DNA
ctctgccgaccctgcagtcac

SEQ ID NO: 35819 - DNA, 21 bp, synthetic construct
  source 1..21: mol_type = other DNA
tgtatgccgggcgtaccgtta

SEQ ID NO: 35820 - DNA, 21 bp, synthetic construct
  source 1..21: mol_type = other DNA
aaagacgactacacaactttt

SEQ ID NO: 35821 - DNA, 21 bp, synthetic construct
  source 1..21: mol_type = other DNA
tacttctccggcaggttgttg

SEQ ID NO: 35822 - DNA, 21 bp, synthetic construct
  source 1..21: mol_type = other DNA
ggtcgtcctaattgcaaacca

SEQ ID NO: 35823 - DNA, 21 bp, synthetic construct
  source 1..21: mol_type = other DNA
tgcaccacgaaaacgggacac

SEQ ID NO: 35824 - DNA, 21 bp, synthetic construct
  source 1..21: mol_type = other DNA
tacagtcgtgtgaaccctaac

SEQ ID NO: 35825 - DNA, 21 bp, synthetic construct
  source 1..21: mol_type = other DNA
tgcaaaggttccgcagagcaa

SEQ ID NO: 35826 - DNA, 21 bp, synthetic construct
  source 1..21: mol_type = other DNA
ccgatggaaagccttaagtgg

SEQ ID NO: 35827 - DNA, 21 bp, synthetic construct
  source 1..21: mol_type = other DNA
aagcacgactttacttgtgct

SEQ ID NO: 35828 - DNA, 21 bp, synthetic construct
  source 1..21: mol_type = other DNA
ctttgcgtaccatgtttaacg

SEQ ID NO: 35829 - DNA, 21 bp, synthetic construct
  source 1..21: mol_type = other DNA
ggaggtggtactaaatgcgga

SEQ ID NO: 35830 - DNA, 21 bp, synthetic construct
  source 1..21: mol_type = other DNA
agggagtgtaccagtccttgg

SEQ ID NO: 35831 - DNA, 21 bp, synthetic construct
  source 1..21: mol_type = other DNA
ctccacaggctaaatccggat

SEQ ID NO: 35832 - DNA, 21 bp, synthetic construct
  source 1..21: mol_type = other DNA
aagtgtaaaccatgtccaatt

SEQ ID NO: 35833 - DNA, 21 bp, synthetic construct
  source 1..21: mol_type = other DNA
tattggagtggcgttgtgatt

SEQ ID NO: 35834 - DNA, 21 bp, synthetic construct
  source 1..21: mol_type = other DNA
tgcaggatggctccaccgtat

SEQ ID NO: 35835 - DNA, 21 bp, synthetic construct
  source 1..21: mol_type = other DNA
ttgtgtaaaccctgtcttcgt

SEQ ID NO: 35836 - DNA, 21 bp, synthetic construct
  source 1..21: mol_type = other DNA
tggaaaatgggatgcgccgat

SEQ ID NO: 35837 - DNA, 21 bp, synthetic construct
  source 1..21: mol_type = other DNA
tgcggaagaagttgctgtcca

SEQ ID NO: 35838 - DNA, 21 bp, synthetic construct
  source 1..21: mol_type = other DNA
tgtaagggaagctatgagcaa

SEQ ID NO: 35839 - DNA, 21 bp, synthetic construct
  source 1..21: mol_type = other DNA
ttcgcgaagtgcaacgcaaat

SEQ ID NO: 35840 - DNA, 21 bp, synthetic construct
  source 1..21: mol_type = other DNA
cgtgacgagtttacaccttgg

SEQ ID NO: 35841 - DNA, 21 bp, synthetic construct
  source 1..21: mol_type = other DNA
ttcgccaagtgcaactataac

SEQ ID NO: 35842 - DNA, 21 bp, synthetic construct
  source 1..21: mol_type = other DNA
gatcacggtaaatgcggtaga

SEQ ID NO: 35843 - DNA, 21 bp, synthetic construct
  source 1..21: mol_type = other DNA
ttcagccgattgggatacaac

SEQ ID NO: 35844 - DNA, 21 bp, synthetic construct
  source 1..21: mol_type = other DNA
tgcaatccttacctgcatgaa

SEQ ID NO: 35845 - DNA, 21 bp, synthetic construct
  source 1..21: mol_type = other DNA
cgctcagaatttgccacctgg

SEQ ID NO: 35846 - DNA, 21 bp, synthetic construct
  source 1..21: mol_type = other DNA
gtgaatgactacaccatattt

SEQ ID NO: 35847 - DNA, 21 bp, synthetic construct
  source 1..21: mol_type = other DNA
ttaaaactttgtgctcataac

SEQ ID NO: 35848 - DNA, 21 bp, synthetic construct
  source 1..21: mol_type = other DNA
acacaaatcgcatgcgaccgg

SEQ ID NO: 35849 - DNA, 21 bp, synthetic construct
  source 1..21: mol_type = other DNA
cgttgcgggataccgacggcc

SEQ ID NO: 35850 - DNA, 21 bp, synthetic construct
  source 1..21: mol_type = other DNA
gggggaggtccatgttgtaga

SEQ ID NO: 35851 - DNA, 21 bp, synthetic construct
  source 1..21: mol_type = other DNA
tggactccccactgtaaggcg

SEQ ID NO: 35852 - DNA, 21 bp, synthetic construct
  source 1..21: mol_type = other DNA
tacggttgtcagtccgggttt

SEQ ID NO: 35853 - DNA, 21 bp, synthetic construct
  source 1..21: mol_type = other DNA
aaagatgaatacacaatgtac

SEQ ID NO: 35854 - DNA, 21 bp, synthetic construct
  source 1..21: mol_type = other DNA
tggaccccaatgtgtaagacc

SEQ ID NO: 35855 - DNA, 21 bp, synthetic construct
  source 1..21: mol_type = other DNA
tatttcgaaggtgtaagatgg

SEQ ID NO: 35856 - DNA, 21 bp, synthetic construct
  source 1..21: mol_type = other DNA
tatgagccagggtgcagtgag

SEQ ID NO: 35857 - DNA, 21 bp, synthetic construct
  source 1..21: mol_type = other DNA
tatttcaccggagcctgcgac

SEQ ID NO: 35858 - DNA, 21 bp, synthetic construct
  source 1..21: mol_type = other DNA
ctattggcaagcgccacctgg

SEQ ID NO: 35859 - DNA, 21 bp, synthetic construct
  source 1..21: mol_type = other DNA
ttttcccgcattggttataac

SEQ ID NO: 35860 - DNA, 21 bp, synthetic construct
  source 1..21: mol_type = other DNA
tactcacgcatacagtttgac

SEQ ID NO: 35861 - DNA, 21 bp, synthetic construct
  source 1..21: mol_type = other DNA
tccagtctttgtctgcgggaa

SEQ ID NO: 35862 - DNA, 21 bp, synthetic construct
  source 1..21: mol_type = other DNA
atagacgagtggttacccttc

SEQ ID NO: 35863 - DNA, 21 bp, synthetic construct
  source 1..21: mol_type = other DNA
ttctgctccacgaatggcgtc

SEQ ID NO: 35864 - DNA, 21 bp, synthetic construct
  source 1..21: mol_type = other DNA
tactttacgggaatgtgtgaa

SEQ ID NO: 35865 - DNA, 21 bp, synthetic construct
  source 1..21: mol_type = other DNA
ctccatagactctcaccttac

SEQ ID NO: 35866 - DNA, 21 bp, synthetic construct
  source 1..21: mol_type = other DNA
aaggatgactacactgtgttc

SEQ ID NO: 35867 - DNA, 21 bp, synthetic construct
  source 1..21: mol_type = other DNA
cgttgccctgactgtcaccta

SEQ ID NO: 35868 - DNA, 21 bp, synthetic construct
  source 1..21: mol_type = other DNA
agggatgaattttgcaccagg

SEQ ID NO: 35869 - DNA, 21 bp, synthetic construct
  source 1..21: mol_type = other DNA
tgtaagcctagtcctttattt

SEQ ID NO: 35870 - DNA, 21 bp, synthetic construct
  source 1..21: mol_type = other DNA
tgtttgccgaagtgttgtgag

SEQ ID NO: 35871 - DNA, 21 bp, synthetic construct
  source 1..21: mol_type = other DNA
tactcgaggataggtaaaaac

SEQ ID NO: 35872 - DNA, 21 bp, synthetic construct
  source 1..21: mol_type = other DNA
tactggacaggatgtagggaa

SEQ ID NO: 35873 - DNA, 21 bp, synthetic construct
  source 1..21: mol_type = other DNA
tatttcgctggagtttgtcct

SEQ ID NO: 35874 - DNA, 21 bp, synthetic construct
  source 1..21: mol_type = other DNA
tgcgcaccgtcgcttcatgag

SEQ ID NO: 35875 - DNA, 21 bp, synthetic construct
  source 1..21: mol_type = other DNA
tgcaagccattgtgttgtgag

SEQ ID NO: 35876 - DNA, 21 bp, synthetic construct
  source 1..21: mol_type = other DNA
agggatgaattcacatcgttc

SEQ ID NO: 35877 - DNA, 21 bp, synthetic construct
  source 1..21: mol_type = other DNA
atgacaggtgacagctgctta

SEQ ID NO: 35878 - DNA, 21 bp, synthetic construct
  source 1..21: mol_type = other DNA
ggtagcgagtttgttaggtgg

SEQ ID NO: 35879 - DNA, 21 bp, synthetic construct
  source 1..21: mol_type = other DNA
tgtggaactaagtgctgtcct

SEQ ID NO: 35880 - DNA, 21 bp, synthetic construct
  source 1..21: mol_type = other DNA
tatttcacagggaaatgtgtg

SEQ ID NO: 35881 - DNA, 21 bp, synthetic construct
  source 1..21: mol_type = other DNA
gtgtggagcaccaacggaagg

SEQ ID NO: 35882 - DNA, 21 bp, synthetic construct
  source 1..21: mol_type = other DNA
tacgtaaaaagccagaaatta

SEQ ID NO: 35883 - DNA, 21 bp, synthetic construct
  source 1..21: mol_type = other DNA
tacgagccaatctgtaaggaa

SEQ ID NO: 35884 - DNA, 21 bp, synthetic construct
  source 1..21: mol_type = other DNA
tcaatctgcgcgaatggtgaa

SEQ ID NO: 35885 - DNA, 21 bp, synthetic construct
  source 1..21: mol_type = other DNA
ctatgcaggccatgtagttta

SEQ ID NO: 35886 - DNA, 21 bp, synthetic construct
  source 1..21: mol_type = other DNA
tggtttagtggggttaggatc

SEQ ID NO: 35887 - DNA, 21 bp, synthetic construct
  source 1..21: mol_type = other DNA
tgcggcagcattcgtccgact

SEQ ID NO: 35888 - DNA, 21 bp, synthetic construct
  source 1..21: mol_type = other DNA
tgctccggccctccaaaagaa

SEQ ID NO: 35889 - DNA, 21 bp, synthetic construct
  source 1..21: mol_type = other DNA
ttgtgtaaaccctgtttgtat

SEQ ID NO: 35890 - DNA, 21 bp, synthetic construct
  source 1..21: mol_type = other DNA
agagatgattggtctacatgg

SEQ ID NO: 35891 - DNA, 21 bp, synthetic construct
  source 1..21: mol_type = other DNA
ggatgtcgcccatgccctggg

SEQ ID NO: 35892 - DNA, 21 bp, synthetic construct
  source 1..21: mol_type = other DNA
ggatgcagaccccaggcagga

SEQ ID NO: 35893 - DNA, 21 bp, synthetic construct
  source 1..21: mol_type = other DNA
tgcacaagcaagacgggttgg

SEQ ID NO: 35894 - DNA, 21 bp, synthetic construct
  source 1..21: mol_type = other DNA
caggatggttcatgtaaggcg

SEQ ID NO: 35895 - DNA, 21 bp, synthetic construct
  source 1..21: mol_type = other DNA
tatttcactggtagatgggac

SEQ ID NO: 35896 - DNA, 21 bp, synthetic construct
  source 1..21: mol_type = other DNA
tgtaagccgccccccctcgcc

SEQ ID NO: 35897 - DNA, 21 bp, synthetic construct
  source 1..21: mol_type = other DNA
cgaatggaaagtagtgtctgg

SEQ ID NO: 35898 - DNA, 21 bp, synthetic construct
  source 1..21: mol_type = other DNA
tgtgggggcttgagtcgtggt

SEQ ID NO: 35899 - DNA, 21 bp, synthetic construct
  source 1..21: mol_type = other DNA
tgccgtacaagcgaatgttgc

SEQ ID NO: 35900 - DNA, 21 bp, synthetic construct
  source 1..21: mol_type = other DNA
aaaagtgattacatgtctttt

SEQ ID NO: 35901 - DNA, 21 bp, synthetic construct
  source 1..21: mol_type = other DNA
gaagacaaatgccggcagttc

SEQ ID NO: 35902 - DNA, 21 bp, synthetic construct
  source 1..21: mol_type = other DNA
ttatgtaaacccgaattgacc

SEQ ID NO: 35903 - DNA, 21 bp, synthetic construct
  source 1..21: mol_type = other DNA
ggcggtgaatttagtaggtgg

SEQ ID NO: 35904 - DNA, 21 bp, synthetic construct
  source 1..21: mol_type = other DNA
tattgccggttgtctgacaac

SEQ ID NO: 35905 - DNA, 21 bp, synthetic construct
  source 1..21: mol_type = other DNA
ggaggagagtatgttacctgg

SEQ ID NO: 35906 - DNA, 21 bp, synthetic construct
  source 1..21: mol_type = other DNA
tgcacgtcacccaccggccac

SEQ ID NO: 35907 - DNA, 21 bp, synthetic construct
  source 1..21: mol_type = other DNA
tgcgggagcaagaccggtcac

SEQ ID NO: 35908 - DNA, 21 bp, synthetic construct
  source 1..21: mol_type = other DNA
ggtggctcgccatgcaggcca

SEQ ID NO: 35909 - DNA, 21 bp, synthetic construct
  source 1..21: mol_type = other DNA
gggggggcaagtagtcgttgg

SEQ ID NO: 35910 - DNA, 21 bp, synthetic construct
  source 1..21: mol_type = other DNA
tggtggagtgctattagagag

SEQ ID NO: 35911 - DNA, 21 bp, synthetic construct
  source 1..21: mol_type = other DNA
ctatgccgtccatgtagcgtg

SEQ ID NO: 35912 - DNA, 21 bp, synthetic construct
  source 1..21: mol_type = other DNA
ggcggaagcccgtgtcgaccg

SEQ ID NO: 35913 - DNA, 21 bp, synthetic construct
  source 1..21: mol_type = other DNA
gacatgcttagttcgtcttgg

SEQ ID NO: 35914 - DNA, 21 bp, synthetic construct
  source 1..21: mol_type = other DNA
ggaagcggcatgtcattatgg

SEQ ID NO: 35915 - DNA, 21 bp, synthetic construct
  source 1..21: mol_type = other DNA
tatgaacaaggttgtaaggag

SEQ ID NO: 35916 - DNA, 21 bp, synthetic construct
  source 1..21: mol_type = other DNA
tgcgggggcggtaggccatgg

SEQ ID NO: 35917 - DNA, 21 bp, synthetic construct
  source 1..21: mol_type = other DNA
tactttacaggaatggttgat

SEQ ID NO: 35918 - DNA, 21 bp, synthetic construct
  source 1..21: mol_type = other DNA
gtgccggggcactgccttgtc

SEQ ID NO: 35919 - DNA, 21 bp, synthetic construct
  source 1..21: mol_type = other DNA
gaaatggaatcgtttaattgg

SEQ ID NO: 35920 - DNA, 21 bp, synthetic construct
  source 1..21: mol_type = other DNA
tgcgctcctcacttgcatgaa

SEQ ID NO: 35921 - DNA, 21 bp, synthetic construct
  source 1..21: mol_type = other DNA
ttggcaaaaacagggaccaat

SEQ ID NO: 35922 - DNA, 21 bp, synthetic construct
  source 1..21: mol_type = other DNA
tatttaaaaagccagttttac

SEQ ID NO: 35923 - DNA, 21 bp, synthetic construct
  source 1..21: mol_type = other DNA
tgcggtaagataaaaccaggt

SEQ ID NO: 35924 - DNA, 21 bp, synthetic construct
  source 1..21: mol_type = other DNA
agggacgaatttgtatactac

SEQ ID NO: 35925 - DNA, 21 bp, synthetic construct
  source 1..21: mol_type = other DNA
cgggacgaatttgtcatatac

SEQ ID NO: 35926 - DNA, 21 bp, synthetic construct
  source 1..21: mol_type = other DNA
ggttgtaggtcaggggacata

SEQ ID NO: 35927 - DNA, 21 bp, synthetic construct
  source 1..21: mol_type = other DNA
ttcggcgaatttaaatgcgaa

SEQ ID NO: 35928 - DNA, 21 bp, synthetic construct
  source 1..21: mol_type = other DNA
tatagtaagcgcaacgtcaac

SEQ ID NO: 35929 - DNA, 21 bp, synthetic construct
  source 1..21: mol_type = other DNA
tgctcgaaattaaaaccgggt

SEQ ID NO: 35930 - DNA, 21 bp, synthetic construct
  source 1..21: mol_type = other DNA
tgtaatgacccgatgacggct

SEQ ID NO: 35931 - DNA, 21 bp, synthetic construct
  source 1..21: mol_type = other DNA
cgcgatgagttcgtgtattat

SEQ ID NO: 35932 - DNA, 21 bp, synthetic construct
  source 1..21: mol_type = other DNA
aagcacgattttacctgctca

SEQ ID NO: 35933 - DNA, 21 bp, synthetic construct
  source 1..21: mol_type = other DNA
tctgattggacggatcgatgt

SEQ ID NO: 35934 - DNA, 21 bp, synthetic construct
  source 1..21: mol_type = other DNA
tgccaagcgaaattagaagtt

SEQ ID NO: 35935 - DNA, 21 bp, synthetic construct
  source 1..21: mol_type = other DNA
tgtgctccttacggacacgaa

SEQ ID NO: 35936 - DNA, 21 bp, synthetic construct
  source 1..21: mol_type = other DNA
ggtgtagagacaaggtgtccc

SEQ ID NO: 35937 - DNA, 21 bp, synthetic construct
  source 1..21: mol_type = other DNA
tattcgtacataggacccaat

SEQ ID NO: 35938 - DNA, 21 bp, synthetic construct
  source 1..21: mol_type = other DNA
tcgtgtatgaatgttgcaccc

SEQ ID NO: 35939 - DNA, 21 bp, synthetic construct
  source 1..21: mol_type = other DNA
atgacagggaccagatgctta

SEQ ID NO: 35940 - DNA, 21 bp, synthetic construct
  source 1..21: mol_type = other DNA
cattgtggcaaatgcctgaat

SEQ ID NO: 35941 - DNA, 21 bp, synthetic construct
  source 1..21: mol_type = other DNA
gggtgtaggcacggtcagatc

SEQ ID NO: 35942 - DNA, 21 bp, synthetic construct
  source 1..21: mol_type = other DNA
tacgagcctggttgcttcgaa

SEQ ID NO: 35943 - DNA, 21 bp, synthetic construct
  source 1..21: mol_type = other DNA
ctttttacgggattcggacca

SEQ ID NO: 35944 - DNA, 21 bp, synthetic construct
  source 1..21: mol_type = other DNA
tgtaaacctctttgcccaggt

SEQ ID NO: 35945 - DNA, 21 bp, synthetic construct
  source 1..21: mol_type = other DNA
taccttaagtcccagtattac

SEQ ID NO: 35946 - DNA, 21 bp, synthetic construct
  source 1..21: mol_type = other DNA
tgtgcggcatatctacatgaa

SEQ ID NO: 35947 - DNA, 21 bp, synthetic construct
  source 1..21: mol_type = other DNA
agtaagggatcatgcgagcaa

SEQ ID NO: 35948 - DNA, 21 bp, synthetic construct
  source 1..21: mol_type = other DNA
gtctgccggccttgccctatt

SEQ ID NO: 35949 - DNA, 21 bp, synthetic construct
  source 1..21: mol_type = other DNA
tgtttcaagccgatgactgct

SEQ ID NO: 35950 - DNA, 21 bp, synthetic construct
  source 1..21: mol_type = other DNA
tcgccggaaaccaggtgtcct

SEQ ID NO: 35951 - DNA, 21 bp, synthetic construct
  source 1..21: mol_type = other DNA
tacgctagatttggcccaaat

SEQ ID NO: 35952 - DNA, 21 bp, synthetic construct
  source 1..21: mol_type = other DNA
taccaccgcttgtccatacac

SEQ ID NO: 35953 - DNA, 21 bp, synthetic construct
  source 1..21: mol_type = other DNA
tgtaccgacaagaccggccac

SEQ ID NO: 35954 - DNA, 21 bp, synthetic construct
  source 1..21: mol_type = other DNA
ggcgatgagtgcgtgaaggcg

SEQ ID NO: 35955 - DNA, 21 bp, synthetic construct
  source 1..21: mol_type = other DNA
tgcacaagcaaaatgggacat

SEQ ID NO: 35956 - DNA, 21 bp, synthetic construct
  source 1..21: mol_type = other DNA
tatagtcggtggaacttgaac

SEQ ID NO: 35957 - DNA, 21 bp, synthetic construct
  source 1..21: mol_type = other DNA
aagtgtgataacactggaagc

SEQ ID NO: 35958 - DNA, 21 bp, synthetic construct
  source 1..21: mol_type = other DNA
gaatgggaagcttgtcctagg

SEQ ID NO: 35959 - DNA, 21 bp, synthetic construct
  source 1..21: mol_type = other DNA
tcgatgagctcagcaatgtgg

SEQ ID NO: 35960 - DNA, 21 bp, synthetic construct
  source 1..21: mol_type = other DNA
gatctcgagagttacaaatgg

SEQ ID NO: 35961 - DNA, 21 bp, synthetic construct
  source 1..21: mol_type = other DNA
atatgcgataagcgggaccca

SEQ ID NO: 35962 - DNA, 21 bp, synthetic construct
  source 1..21: mol_type = other DNA
ttccatagaaagagtcccgat

SEQ ID NO: 35963 - DNA, 21 bp, synthetic construct
  source 1..21: mol_type = other DNA
aaaaatgaccatgttaggtgg

SEQ ID NO: 35964 - DNA, 21 bp, synthetic construct
  source 1..21: mol_type = other DNA
tgtcggggggaacaaaaaatg

SEQ ID NO: 35965 - DNA, 21 bp, synthetic construct
  source 1..21: mol_type = other DNA
cgttcagagtatactaccttc

SEQ ID NO: 35966 - DNA, 21 bp, synthetic construct
  source 1..21: mol_type = other DNA
agggacgaattcgtaacctat

SEQ ID NO: 35967 - DNA, 21 bp, synthetic construct
  source 1..21: mol_type = other DNA
ggggtaggaaccaaatgtgga

SEQ ID NO: 35968 - DNA, 21 bp, synthetic construct
  source 1..21: mol_type = other DNA
cccatggaatcacagaagtgg

SEQ ID NO: 35969 - DNA, 21 bp, synthetic construct
  source 1..21: mol_type = other DNA
ttatgcagaccatgttcaatg

SEQ ID NO: 35970 - DNA, 21 bp, synthetic construct
  source 1..21: mol_type = other DNA
cagctgcctggtaattgcgga

SEQ ID NO: 35971 - DNA, 21 bp, synthetic construct
  source 1..21: mol_type = other DNA
ggcggagaatttgtccattgg

SEQ ID NO: 35972 - DNA, 21 bp, synthetic construct
  source 1..21: mol_type = other DNA
agggacccttgtacagttgat

SEQ ID NO: 35973 - DNA, 21 bp, synthetic construct
  source 1..21: mol_type = other DNA
agggacgaatactcctcttat

SEQ ID NO: 35974 - DNA, 21 bp, synthetic construct
  source 1..21: mol_type = other DNA
gggtcaggaatgagtctctgg

SEQ ID NO: 35975 - DNA, 21 bp, synthetic construct
  source 1..21: mol_type = other DNA
cgagatgagtattcaagttac

SEQ ID NO: 35976 - DNA, 21 bp, synthetic construct
  source 1..21: mol_type = other DNA
atgatgggtacttcctgctta

SEQ ID NO: 35977 - DNA, 21 bp, synthetic construct
  source 1..21: mol_type = other DNA
tacttcgcggggcgtccggac

SEQ ID NO: 35978 - DNA, 21 bp, synthetic construct
  source 1..21: mol_type = other DNA
ggccccataaattgcaaatca

SEQ ID NO: 35979 - DNA, 21 bp, synthetic construct
  source 1..21: mol_type = other DNA
gtttcgacacattgtgacgcg

SEQ ID NO: 35980 - DNA, 21 bp, synthetic construct
  source 1..21: mol_type = other DNA
aagtctgactacatggtctat

SEQ ID NO: 35981 - DNA, 21 bp, synthetic construct
  source 1..21: mol_type = other DNA
gtcccagagtgccgtcctaac

SEQ ID NO: 35982 - DNA, 21 bp, synthetic construct
  source 1..21: mol_type = other DNA
agaacggccctggtctttccg

SEQ ID NO: 35983 - DNA, 21 bp, synthetic construct
  source 1..21: mol_type = other DNA
tatagccgctatggtatgaac

SEQ ID NO: 35984 - DNA, 21 bp, synthetic construct
  source 1..21: mol_type = other DNA
ttatggaggactgggatcaac

SEQ ID NO: 35985 - DNA, 21 bp, synthetic construct
  source 1..21: mol_type = other DNA
atcgatgaatggctcccattt

SEQ ID NO: 35986 - DNA, 21 bp, synthetic construct
  source 1..21: mol_type = other DNA
gggggcccgcactgctgcggc

SEQ ID NO: 35987 - DNA, 21 bp, synthetic construct
  source 1..21: mol_type = other DNA
ggttcagattttagcaggtgg

SEQ ID NO: 35988 - DNA, 21 bp, synthetic construct
  source 1..21: mol_type = other DNA
gctatggagtcgagtaactgg

SEQ ID NO: 35989 - DNA, 21 bp, synthetic construct
  source 1..21: mol_type = other DNA
cgcgatgatttcgttgccttc

SEQ ID NO: 35990 - DNA, 21 bp, synthetic construct
  source 1..21: mol_type = other DNA
agcctctgtaaaaccacgtca

SEQ ID NO: 35991 - DNA, 21 bp, synthetic construct
  source 1..21: mol_type = other DNA
ggcatggaattttgtcggcca

SEQ ID NO: 35992 - DNA, 21 bp, synthetic construct
  source 1..21: mol_type = other DNA
ttcgaggggaccaactgccgc

SEQ ID NO: 35993 - DNA, 21 bp, synthetic construct
  source 1..21: mol_type = other DNA
ttcgcgcgtgcatgtcaaaac

SEQ ID NO: 35994 - DNA, 21 bp, synthetic construct
  source 1..21: mol_type = other DNA
gtttcatcgacttgcacggcc

SEQ ID NO: 35995 - DNA, 21 bp, synthetic construct
  source 1..21: mol_type = other DNA
ttgtgtcgacctgcgtccgaa

SEQ ID NO: 35996 - DNA, 21 bp, synthetic construct
  source 1..21: mol_type = other DNA
tacagtcgccacgggcctaac

SEQ ID NO: 35997 - DNA, 21 bp, synthetic construct
  source 1..21: mol_type = other DNA
ttttggagtggcatccatagt

SEQ ID NO: 35998 - DNA, 21 bp, synthetic construct
  source 1..21: mol_type = other DNA
ttacaccggttaagcccatat

SEQ ID NO: 35999 - DNA, 21 bp, synthetic construct
  source 1..21: mol_type = other DNA
ttcgcgaagtgttccgtggtg

SEQ ID NO: 36000 - DNA, 21 bp, synthetic construct
  source 1..21: mol_type = other DNA
ctgttgtcaagccacgattgg

SEQ ID NO: 36001 - DNA, 21 bp, synthetic construct
  source 1..21: mol_type = other DNA
cgcagcgaattcatggtctat

SEQ ID NO: 36002 - DNA, 21 bp, synthetic construct
  source 1..21: mol_type = other DNA
tgcaagccccagatgggcact

SEQ ID NO: 36003 - DNA, 21 bp, synthetic construct
  source 1..21: mol_type = other DNA
ggttcggggacgagtaggtgg

SEQ ID NO: 36004 - DNA, 21 bp, synthetic construct
  source 1..21: mol_type = other DNA
cgaggggaatttacagcgtat

SEQ ID NO: 36005 - DNA, 21 bp, synthetic construct
  source 1..21: mol_type = other DNA
gcctgcaaaccacaaatgggg

SEQ ID NO: 36006 - DNA, 21 bp, synthetic construct
  source 1..21: mol_type = other DNA
agggagagcacgaatggacgc

SEQ ID NO: 36007 - DNA, 21 bp, synthetic construct
  source 1..21: mol_type = other DNA
atgacgggaacgtcgtgtact

SEQ ID NO: 36008 - DNA, 21 bp, synthetic construct
  source 1..21: mol_type = other DNA
tatgtccgttcatgtccaatg

SEQ ID NO: 36009 - DNA, 21 bp, synthetic construct
  source 1..21: mol_type = other DNA
tgtgagtttggccccatgcct

SEQ ID NO: 36010 - DNA, 21 bp, synthetic construct
  source 1..21: mol_type = other DNA
atgacgggtaacagttgtctc

SEQ ID NO: 36011 - DNA, 21 bp, synthetic construct
  source 1..21: mol_type = other DNA
tgcaaacccaatcccagcgtg

SEQ ID NO: 36012 - DNA, 21 bp, synthetic construct
  source 1..21: mol_type = other DNA
tttactggtacatcttgctta

SEQ ID NO: 36013 - DNA, 21 bp, synthetic construct
  source 1..21: mol_type = other DNA
ttaaaggatggaacttgcatc

SEQ ID NO: 36014 - DNA, 21 bp, synthetic construct
  source 1..21: mol_type = other DNA
gattacgaaagtgcttgtgtt

SEQ ID NO: 36015 - DNA, 21 bp, synthetic construct
  source 1..21: mol_type = other DNA
aaagaagattttttaagctgg

SEQ ID NO: 36016 - DNA, 21 bp, synthetic construct
  source 1..21: mol_type = other DNA
ggcgtagaaatggttaggtgg

SEQ ID NO: 36017 - DNA, 21 bp, synthetic construct
  source 1..21: mol_type = other DNA
gttgatgagtttcttagttgg

SEQ ID NO: 36018 - DNA, 21 bp, synthetic construct
  source 1..21: mol_type = other DNA
tattttacagggaacattaat

SEQ ID NO: 36019 - DNA, 21 bp, synthetic construct
  source 1..21: mol_type = other DNA
tgttacccgcttcgccctgaa

SEQ ID NO: 36020 - DNA, 21 bp, synthetic construct
  source 1..21: mol_type = other DNA
tgtgacggaagttataaggcc

SEQ ID NO: 36021 - DNA, 21 bp, synthetic construct
  source 1..21: mol_type = other DNA
ttcgctcgtcatggatacaac

SEQ ID NO: 36022 - DNA, 21 bp, synthetic construct
  source 1..21: mol_type = other DNA
agtcaatgcacgagcagccct

SEQ ID NO: 36023 - DNA, 21 bp, synthetic construct
  source 1..21: mol_type = other DNA
gccatggaatctacccagtgg

SEQ ID NO: 36024 - DNA, 21 bp, synthetic construct
  source 1..21: mol_type = other DNA
tgtaagccaccctcagatatg

SEQ ID NO: 36025 - DNA, 21 bp, synthetic construct
  source 1..21: mol_type = other DNA
gggtgtcgtccctgtagcgag

SEQ ID NO: 36026 - DNA, 21 bp, synthetic construct
  source 1..21: mol_type = other DNA
cgcagcgagacatcatattgg

SEQ ID NO: 36027 - DNA, 21 bp, synthetic construct
  source 1..21: mol_type = other DNA
tttagtagactaggcataaac

SEQ ID NO: 36028 - DNA, 21 bp, synthetic construct
  source 1..21: mol_type = other DNA
tgtgattacggcagccgctcg

SEQ ID NO: 36029 - DNA, 21 bp, synthetic construct
  source 1..21: mol_type = other DNA
gagatggagagctttaactgg

SEQ ID NO: 36030 - DNA, 21 bp, synthetic construct
  source 1..21: mol_type = other DNA
tacggccgggggtgctgcggt

SEQ ID NO: 36031 - DNA, 21 bp, synthetic construct
  source 1..21: mol_type = other DNA
tggagccggataggtcccaac

SEQ ID NO: 36032 - DNA, 21 bp, synthetic construct
  source 1..21: mol_type = other DNA
tgcacatcgaaaactaatcat

SEQ ID NO: 36033 - DNA, 21 bp, synthetic construct
  source 1..21: mol_type = other DNA
agcaccggcaccagctgtctc

SEQ ID NO: 36034 - DNA, 21 bp, synthetic construct
  source 1..21: mol_type = other DNA
aagaaaggtagctgcgagcag

SEQ ID NO: 36035 - DNA, 21 bp, synthetic construct
  source 1..21: mol_type = other DNA
aagaacgactaccttatctat

SEQ ID NO: 36036 - DNA, 21 bp, synthetic construct
  source 1..21: mol_type = other DNA
tgtggcaaagactgctgtccc

SEQ ID NO: 36037 - DNA, 21 bp, synthetic construct
  source 1..21: mol_type = other DNA
agagacgagttcgttatgttc

SEQ ID NO: 36038 - DNA, 21 bp, synthetic construct
  source 1..21: mol_type = other DNA
aaagacgatttcttgacatgg

SEQ ID NO: 36039 - DNA, 21 bp, synthetic construct
  source 1..21: mol_type = other DNA
aagtgtaaagagaacgaaccc

SEQ ID NO: 36040 - DNA, 21 bp, synthetic construct
  source 1..21: mol_type = other DNA
cggacgtacaatatgtatccg

SEQ ID NO: 36041 - DNA, 21 bp, synthetic construct
  source 1..21: mol_type = other DNA
gttgggtatgatcgcgggtgg

SEQ ID NO: 36042 - DNA, 21 bp, synthetic construct
  source 1..21: mol_type = other DNA
cgtctcgagtctagtctttgg

SEQ ID NO: 36043 - DNA, 21 bp, synthetic construct
  source 1..21: mol_type = other DNA
tgtaaactcgaatacaaggag

SEQ ID NO: 36044 - DNA, 21 bp, synthetic construct
  source 1..21: mol_type = other DNA
gtcaatgaattccttccttac

SEQ ID NO: 36045 - DNA, 21 bp, synthetic construct
  source 1..21: mol_type = other DNA
ttattcaaggaatgcggcggc

SEQ ID NO: 36046 - DNA, 21 bp, synthetic construct
  source 1..21: mol_type = other DNA
agcatgtcaagtgctatgtgg

SEQ ID NO: 36047 - DNA, 21 bp, synthetic construct
  source 1..21: mol_type = other DNA
cataaagagggatgtggctta

SEQ ID NO: 36048 - DNA, 21 bp, synthetic construct
  source 1..21: mol_type = other DNA
gtcgatgagtggcttccattt

SEQ ID NO: 36049 - DNA, 21 bp, synthetic construct
  source 1..21: mol_type = other DNA
tgcagaatcgagagtagagct

SEQ ID NO: 36050 - DNA, 21 bp, synthetic construct
  source 1..21: mol_type = other DNA
aaagatgggagttcttactgg

SEQ ID NO: 36051 - DNA, 21 bp, synthetic construct
  source 1..21: mol_type = other DNA
cctaaagggccctgtgacgca

SEQ ID NO: 36052 - DNA, 21 bp, synthetic construct
  source 1..21: mol_type = other DNA
gtcctacactccagcaactgg

SEQ ID NO: 36053 - DNA, 21 bp, synthetic construct
  source 1..21: mol_type = other DNA
gtttgttctaagaaaccggcg

SEQ ID NO: 36054 - DNA, 21 bp, synthetic construct
  source 1..21: mol_type = other DNA
gaccgcgggggttgtaaacct

SEQ ID NO: 36055 - DNA, 21 bp, synthetic construct
  source 1..21: mol_type = other DNA
tttgatggctacagtgcatat

SEQ ID NO: 36056 - DNA, 21 bp, synthetic construct
  source 1..21: mol_type = other DNA
ggcggtccaagctgtaaaccc

SEQ ID NO: 36057 - DNA, 21 bp, synthetic construct
  source 1..21: mol_type = other DNA
tgtatgagcgattcgaaagcg

SEQ ID NO: 36058 - DNA, 21 bp, synthetic construct
  source 1..21: mol_type = other DNA
gatctcatgtcagccggatgg

SEQ ID NO: 36059 - DNA, 21 bp, synthetic construct
  source 1..21: mol_type = other DNA
tacttcactcacaggtatgat

SEQ ID NO: 36060 - DNA, 21 bp, synthetic construct
  source 1..21: mol_type = other DNA
atgtgggacggaacatacgcc

SEQ ID NO: 36061 - DNA, 21 bp, synthetic construct
  source 1..21: mol_type = other DNA
tatagtcgcctcgattacgac

SEQ ID NO: 36062 - DNA, 21 bp, synthetic construct
  source 1..21: mol_type = other DNA
gatatgacaagttcacaatgg

SEQ ID NO: 36063 - DNA, 21 bp, synthetic construct
  source 1..21: mol_type = other DNA
gattatgcatcaatcaaatgg

SEQ ID NO: 36064 - DNA, 21 bp, synthetic construct
  source 1..21: mol_type = other DNA
atgggatacgaccgagggtgg

SEQ ID NO: 36065 - DNA, 21 bp, synthetic construct
  source 1..21: mol_type = other DNA
tattcacggctcggtttcaat

SEQ ID NO: 36066 - DNA, 21 bp, synthetic construct
  source 1..21: mol_type = other DNA
tgtaaggaggtaaaaggttgg

SEQ ID NO: 36067 - DNA, 21 bp, synthetic construct
  source 1..21: mol_type = other DNA
atcagagggatacatcatcag

SEQ ID NO: 36068 - DNA, 21 bp, synthetic construct
  source 1..21: mol_type = other DNA
tttgaagaacacccgagctgg

SEQ ID NO: 36069 - DNA, 21 bp, synthetic construct
  source 1..21: mol_type = other DNA
ggtggcgattggagcacttat

SEQ ID NO: 36070 - DNA, 21 bp, synthetic construct
  source 1..21: mol_type = other DNA
cttggtaggccatgctcggaa

SEQ ID NO: 36071 - DNA, 21 bp, synthetic construct
  source 1..21: mol_type = other DNA
tactttatggggcgtagcgat

SEQ ID NO: 36072 - DNA, 21 bp, synthetic construct
  source 1..21: mol_type = other DNA
atccataaatatgtagggggg

SEQ ID NO: 36073 - DNA, 21 bp, synthetic construct
  source 1..21: mol_type = other DNA
cgcgaggaattcaccgtgtgg

SEQ ID NO: 36074 - DNA, 21 bp, synthetic construct
  source 1..21: mol_type = other DNA
aaagatggctactcggtttgg

SEQ ID NO: 36075 - DNA, 21 bp, synthetic construct
  source 1..21: mol_type = other DNA
tggccctttggcatggatgcc

SEQ ID NO: 36076 - DNA, 21 bp, synthetic construct
  source 1..21: mol_type = other DNA
aaggaggactggactccttgg

SEQ ID NO: 36077 - DNA, 21 bp, synthetic construct
  source 1..21: mol_type = other DNA
gggactgaatatgttagttat

SEQ ID NO: 36078 - DNA, 21 bp, synthetic construct
  source 1..21: mol_type = other DNA
acaaatagttctaatggcgta

SEQ ID NO: 36079 - DNA, 21 bp, synthetic construct
  source 1..21: mol_type = other DNA
ctatggagtgggatagggcca

SEQ ID NO: 36080 - DNA, 21 bp, synthetic construct
  source 1..21: mol_type = other DNA
gtacccgagcgagtatgtggc

SEQ ID NO: 36081 - DNA, 21 bp, synthetic construct
  source 1..21: mol_type = other DNA
atcatgggcaaatgtcctggg

SEQ ID NO: 36082 - DNA, 21 bp, synthetic construct
  source 1..21: mol_type = other DNA
tacttcacaaaccagattaac

SEQ ID NO: 36083 - DNA, 21 bp, synthetic construct
  source 1..21: mol_type = other DNA
tgtaagcctcttatgctggaa

SEQ ID NO: 36084 - DNA, 21 bp, synthetic construct
  source 1..21: mol_type = other DNA
aacatggccagttccggctgg

SEQ ID NO: 36085 - DNA, 21 bp, synthetic construct
  source 1..21: mol_type = other DNA
ttgcatcgcttatgtcctgat

SEQ ID NO: 36086 - DNA, 21 bp, synthetic construct
  source 1..21: mol_type = other DNA
ggccgcgatggggtacgttgg

SEQ ID NO: 36087 - DNA, 21 bp, synthetic construct
  source 1..21: mol_type = other DNA
agactggaatcaatcaactgg

SEQ ID NO: 36088 - DNA, 21 bp, synthetic construct
  source 1..21: mol_type = other DNA
ctctgggatgggacttttgca

SEQ ID NO: 36089 - DNA, 21 bp, synthetic construct
  source 1..21: mol_type = other DNA
tatagcaaatataatcccaac

SEQ ID NO: 36090 - DNA, 21 bp, synthetic construct
  source 1..21: mol_type = other DNA
aggagcgagttccgatcatac

SEQ ID NO: 36091 - DNA, 21 bp, synthetic construct
  source 1..21: mol_type = other DNA
ctcgctacgggggacggcccc

SEQ ID NO: 36092 - DNA, 21 bp, synthetic construct
  source 1..21: mol_type = other DNA
accgatgagtggcagagctat

SEQ ID NO: 36093 - DNA, 21 bp, synthetic construct
  source 1..21: mol_type = other DNA
ataccccgcacatgtccgccg

SEQ ID NO: 36094 - DNA, 21 bp, synthetic construct
  source 1..21: mol_type = other DNA
atgacaggcgttagctgcctt

SEQ ID NO: 36095 - DNA, 21 bp, synthetic construct
  source 1..21: mol_type = other DNA
gacttttacggcacaccatct

SEQ ID NO: 36096 - DNA, 21 bp, synthetic construct
  source 1..21: mol_type = other DNA
cgaaacgacaccgtatattgg

SEQ ID NO: 36097 - DNA, 21 bp, synthetic construct
  source 1..21: mol_type = other DNA
gacctaaggactgcgtcatgg

SEQ ID NO: 36098 - DNA, 21 bp, synthetic construct
  source 1..21: mol_type = other DNA
acatgggacggtttattggca

SEQ ID NO: 36099 - DNA, 21 bp, synthetic construct
  source 1..21: mol_type = other DNA
atgttcgatggttcgtcggct

SEQ ID NO: 36100 - DNA, 21 bp, synthetic construct
  source 1..21: mol_type = other DNA
ctatgtaaaccatgtaagacc

SEQ ID NO: 36101 - DNA, 21 bp, synthetic construct
  source 1..21: mol_type = other DNA
tgtaaagatgggtgctgctct

SEQ ID NO: 36102 - DNA, 21 bp, synthetic construct
  source 1..21: mol_type = other DNA
tacagtcgtgttggttataat

SEQ ID NO: 36103 - DNA, 21 bp, synthetic construct
  source 1..21: mol_type = other DNA
tgcaaagcccgtgattgctgc

SEQ ID NO: 36104 - DNA, 21 bp, synthetic construct
  source 1..21: mol_type = other DNA
ttgtgcaagtcctgcctcacg

SEQ ID NO: 36105 - DNA, 21 bp, synthetic construct
  source 1..21: mol_type = other DNA
cggagtcctaccagctattgg

SEQ ID NO: 36106 - DNA, 21 bp, synthetic construct
  source 1..21: mol_type = other DNA
aatagcgagtatttgccgttc

SEQ ID NO: 36107 - DNA, 21 bp, synthetic construct
  source 1..21: mol_type = other DNA
ctttgtaagccgtgtctacac

SEQ ID NO: 36108 - DNA, 21 bp, synthetic construct
  source 1..21: mol_type = other DNA
ggcggagaattttcaacttgg

SEQ ID NO: 36109 - DNA, 21 bp, synthetic construct
  source 1..21: mol_type = other DNA
tgctttaagaaatctacctcg

SEQ ID NO: 36110 - DNA, 21 bp, synthetic construct
  source 1..21: mol_type = other DNA
tgtaaaccgggtacgtggcct

SEQ ID NO: 36111 - DNA, 21 bp, synthetic construct
  source 1..21: mol_type = other DNA
tacagtcgtgtaaaccctaat

SEQ ID NO: 36112 - DNA, 21 bp, synthetic construct
  source 1..21: mol_type = other DNA
ggctgtagacacggcatgata

SEQ ID NO: 36113 - DNA, 21 bp, synthetic construct
  source 1..21: mol_type = other DNA
ggcggtacaacgagctgttgg

SEQ ID NO: 36114 - DNA, 21 bp, synthetic construct
  source 1..21: mol_type = other DNA
tgcaatgatccgatgactgcc

SEQ ID NO: 36115 - DNA, 21 bp, synthetic construct
  source 1..21: mol_type = other DNA
ttgtgtaagcctatcctaacc

SEQ ID NO: 36116 - DNA, 21 bp, synthetic construct
  source 1..21: mol_type = other DNA
tactggccaggttgtaaggaa

SEQ ID NO: 36117 - DNA, 21 bp, synthetic construct
  source 1..21: mol_type = other DNA
tgtaagccgaaatgcccagta

SEQ ID NO: 36118 - DNA, 21 bp, synthetic construct
  source 1..21: mol_type = other DNA
tgtgggccggggaagtgttgt

SEQ ID NO: 36119 - DNA, 21 bp, synthetic construct
  source 1..21: mol_type = other DNA
tgtcacgacttcactgggagt

SEQ ID NO: 36120 - DNA, 21 bp, synthetic construct
  source 1..21: mol_type = other DNA
ggtgatggatcttgtaaggcg

SEQ ID NO: 36121 - DNA, 21 bp, synthetic construct
  source 1..21: mol_type = other DNA
acgaatccatttaataaacac

SEQ ID NO: 36122 - DNA, 21 bp, synthetic construct
  source 1..21: mol_type = other DNA
tgtgcaccgtatacgcacgaa

SEQ ID NO: 36123 - DNA, 21 bp, synthetic construct
  source 1..21: mol_type = other DNA
aggccggacttctgtcccttc

SEQ ID NO: 36124 - DNA, 21 bp, synthetic construct
  source 1..21: mol_type = other DNA
gacagtagctgggaaatgtgg

SEQ ID NO: 36125 - DNA, 21 bp, synthetic construct
  source 1..21: mol_type = other DNA
ggcaaagggacgaagtgcgga

SEQ ID NO: 36126 - DNA, 21 bp, synthetic construct
  source 1..21: mol_type = other DNA
taccatcgtagaggtccagac

SEQ ID NO: 36127 - DNA, 21 bp, synthetic construct
  source 1..21: mol_type = other DNA
gggagccctggagtggcgtgg

SEQ ID NO: 36128 - DNA, 21 bp, synthetic construct
  source 1..21: mol_type = other DNA
ggcagtactccctgctgtcgt

SEQ ID NO: 36129 - DNA, 21 bp, synthetic construct
  source 1..21: mol_type = other DNA
catgaagactcatgctccgca

SEQ ID NO: 36130 - DNA, 21 bp, synthetic construct
  source 1..21: mol_type = other DNA
tgcctccgagcgtgccgtcca

SEQ ID NO: 36131 - DNA, 21 bp, synthetic construct
  source 1..21: mol_type = other DNA
ggtggcgagcgcagttgctgg

SEQ ID NO: 36132 - DNA, 21 bp, synthetic construct
  source 1..21: mol_type = other DNA
agttgccaagacaggtcgtgg

SEQ ID NO: 36133 - DNA, 21 bp, synthetic construct
  source 1..21: mol_type = other DNA
ggatcgccttgtacgccctgg

SEQ ID NO: 36134 - DNA, 21 bp, synthetic construct
  source 1..21: mol_type = other DNA
tgcgcgccatatttgggggag

SEQ ID NO: 36135 - DNA, 21 bp, synthetic construct
  source 1..21: mol_type = other DNA
cgcacgccctgcctcgggcca

SEQ ID NO: 36136 - DNA, 21 bp, synthetic construct
  source 1..21: mol_type = other DNA
tactcaaaatataattgtaat

SEQ ID NO: 36137 - DNA, 21 bp, synthetic construct
  source 1..21: mol_type = other DNA
tgcaaggacgtatgctgtgcg

SEQ ID NO: 36138 - DNA, 21 bp, synthetic construct
  source 1..21: mol_type = other DNA
cagaatgaatttctgccgtgg

SEQ ID NO: 36139 - DNA, 21 bp, synthetic construct
  source 1..21: mol_type = other DNA
tggacccccatgtgtcgtgca

SEQ ID NO: 36140 - DNA, 21 bp, synthetic construct
  source 1..21: mol_type = other DNA
tgtaaacctgaccactgggat

SEQ ID NO: 36141 - DNA, 21 bp, synthetic construct
  source 1..21: mol_type = other DNA
aactcagcttacgggttgcgc

SEQ ID NO: 36142 - DNA, 21 bp, synthetic construct
  source 1..21: mol_type = other DNA
gcgggatgcgacaggggttgg

SEQ ID NO: 36143 - DNA, 21 bp, synthetic construct
  source 1..21: mol_type = other DNA
tgcgcgccggattaccgagat

SEQ ID NO: 36144 - DNA, 21 bp, synthetic construct
  source 1..21: mol_type = other DNA
tggactccgatgtgtatggca

SEQ ID NO: 36145 - DNA, 21 bp, synthetic construct
  source 1..21: mol_type = other DNA
ttcgccaagtataattgtaat

SEQ ID NO: 36146 - DNA, 21 bp, synthetic construct
  source 1..21: mol_type = other DNA
ttatgtttgccttgttcagaa

SEQ ID NO: 36147 - DNA, 21 bp, synthetic construct
  source 1..21: mol_type = other DNA
tgcaaacctacctgctgcgaa

SEQ ID NO: 36148 - DNA, 21 bp, synthetic construct
  source 1..21: mol_type = other DNA
gggggagaattctccgcgtgg

SEQ ID NO: 36149 - DNA, 21 bp, synthetic construct
  source 1..21: mol_type = other DNA
ctcgcctataacgtttcaaca

SEQ ID NO: 36150 - DNA, 21 bp, synthetic construct
  source 1..21: mol_type = other DNA
gggggggactttgagcactgg

SEQ ID NO: 36151 - DNA, 21 bp, synthetic construct
  source 1..21: mol_type = other DNA
tgtaataaaccaatgactgga

SEQ ID NO: 36152 - DNA, 21 bp, synthetic construct
  source 1..21: mol_type = other DNA
tactctaaatacgggccgaac

SEQ ID NO: 36153 - DNA, 21 bp, synthetic construct
  source 1..21: mol_type = other DNA
tgcaagcctaagaaatgtgat

SEQ ID NO: 36154 - DNA, 21 bp, synthetic construct
  source 1..21: mol_type = other DNA
tttagtaaaatgttctacaat

SEQ ID NO: 36155 - DNA, 21 bp, synthetic construct
  source 1..21: mol_type = other DNA
aagtacgattatacaggattt

SEQ ID NO: 36156 - DNA, 21 bp, synthetic construct
  source 1..21: mol_type = other DNA
tgtaagccagatgaattcggc

SEQ ID NO: 36157 - DNA, 21 bp, synthetic construct
  source 1..21: mol_type = other DNA
acgcaatgtaaggaacactac

SEQ ID NO: 36158 - DNA, 21 bp, synthetic construct
  source 1..21: mol_type = other DNA
gcttgcgaccggagtcatacg

SEQ ID NO: 36159 - DNA, 21 bp, synthetic construct
  source 1..21: mol_type = other DNA
accaattgcgcgattaatgct

SEQ ID NO: 36160 - DNA, 21 bp, synthetic construct
  source 1..21: mol_type = other DNA
atttacgcaagctctacttgg

SEQ ID NO: 36161 - DNA, 21 bp, synthetic construct
  source 1..21: mol_type = other DNA
ccttgtaaggcaacatgtgta

SEQ ID NO: 36162 - DNA, 21 bp, synthetic construct
  source 1..21: mol_type = other DNA
tgcacaatgaaaacaggacac

SEQ ID NO: 36163 - DNA, 21 bp, synthetic construct
  source 1..21: mol_type = other DNA
aattcgtgtaacatgacgaga

SEQ ID NO: 36164 - DNA, 21 bp, synthetic construct
  source 1..21: mol_type = other DNA
ttgtgtaaaccgggcttaacc

SEQ ID NO: 36165 - DNA, 21 bp, synthetic construct
  source 1..21: mol_type = other DNA
ataaagaaaaattgctgtgcc

SEQ ID NO: 36166 - DNA, 21 bp, synthetic construct
  source 1..21: mol_type = other DNA
gttggtccggtcctatgttcg

SEQ ID NO: 36167 - DNA, 21 bp, synthetic construct
  source 1..21: mol_type = other DNA
gctggctatgaccgccactgg

SEQ ID NO: 36168 - DNA, 21 bp, synthetic construct
  source 1..21: mol_type = other DNA
gggggtgaatttgtgagctgg

SEQ ID NO: 36169 - DNA, 21 bp, synthetic construct
  source 1..21: mol_type = other DNA
tatgaaccgggctgtaaacat

SEQ ID NO: 36170 - DNA, 21 bp, synthetic construct
  source 1..21: mol_type = other DNA
atgacacaaacatcatgcctc

SEQ ID NO: 36171 - DNA, 21 bp, synthetic construct
  source 1..21: mol_type = other DNA
ctccatagattgtcggactgg

SEQ ID NO: 36172 - DNA, 21 bp, synthetic construct
  source 1..21: mol_type = other DNA
tgtaagcctcatcccttgttg

SEQ ID NO: 36173 - DNA, 21 bp, synthetic construct
  source 1..21: mol_type = other DNA
ttccatagatatggtccggat

SEQ ID NO: 36174 - DNA, 21 bp, synthetic construct
  source 1..21: mol_type = other DNA
catgaggatagttgcagtgct

SEQ ID NO: 36175 - DNA, 21 bp, synthetic construct
  source 1..21: mol_type = other DNA
tattcgaggtgtaatttaaac

SEQ ID NO: 36176 - DNA, 21 bp, synthetic construct
  source 1..21: mol_type = other DNA
aagtttgattatagctcctac

SEQ ID NO: 36177 - DNA, 21 bp, synthetic construct
  source 1..21: mol_type = other DNA
acagataaaagcgcaggttgt

SEQ ID NO: 36178 - DNA, 21 bp, synthetic construct
  source 1..21: mol_type = other DNA
gtccctgagttctgtccgtat

SEQ ID NO: 36179 - DNA, 21 bp, synthetic construct
  source 1..21: mol_type = other DNA
ggagaacccggctgtaaggag

SEQ ID NO: 36180 - DNA, 21 bp, synthetic construct
  source 1..21: mol_type = other DNA
tgcgggtacactaaccacgtg

SEQ ID NO: 36181 - DNA, 21 bp, synthetic construct
  source 1..21: mol_type = other DNA
tataggtttagtgagggtcgc

SEQ ID NO: 36182 - DNA, 21 bp, synthetic construct
  source 1..21: mol_type = other DNA
tgtttaaagcctactagttgt

SEQ ID NO: 36183 - DNA, 21 bp, synthetic construct
  source 1..21: mol_type = other DNA
gtgagcacccattgctacgca

SEQ ID NO: 36184 - DNA, 21 bp, synthetic construct
  source 1..21: mol_type = other DNA
caaccgccctcatgcaaagca

SEQ ID NO: 36185 - DNA, 21 bp, synthetic construct
  source 1..21: mol_type = other DNA
tgtaaagatggcaagcattgc

SEQ ID NO: 36186 - DNA, 21 bp, synthetic construct
  source 1..21: mol_type = other DNA
tacggcccgggatgtaaggag

SEQ ID NO: 36187 - DNA, 21 bp, synthetic construct
  source 1..21: mol_type = other DNA
aagcacgaatttacagcgttc

SEQ ID NO: 36188 - DNA, 21 bp, synthetic construct
  source 1..21: mol_type = other DNA
ctgtgtaaaccattgctcacg

SEQ ID NO: 36189 - DNA, 21 bp, synthetic construct
  source 1..21: mol_type = other DNA
tactggacaggcatgatcgtc

SEQ ID NO: 36190 - DNA, 21 bp, synthetic construct
  source 1..21: mol_type = other DNA
tgcagtgagcaattcccgtgt

SEQ ID NO: 36191 - DNA, 21 bp, synthetic construct
  source 1..21: mol_type = other DNA
tattgtagggatggagagaat

SEQ ID NO: 36192 - DNA, 21 bp, synthetic construct
  source 1..21: mol_type = other DNA
ctagcggctagttgttgtgtg

SEQ ID NO: 36193 - DNA, 21 bp, synthetic construct
  source 1..21: mol_type = other DNA
tgtaagcccaacacctcgtgg

SEQ ID NO: 36194 - DNA, 21 bp, synthetic construct
  source 1..21: mol_type = other DNA
tgcgctccagaccaccgggaa

SEQ ID NO: 36195 - DNA, 21 bp, synthetic construct
  source 1..21: mol_type = other DNA
ttctgcaggccatgccccgtg

SEQ ID NO: 36196 - DNA, 21 bp, synthetic construct
  source 1..21: mol_type = other DNA
tttgccaagtgtaatattaac

SEQ ID NO: 36197 - DNA, 21 bp, synthetic construct
  source 1..21: mol_type = other DNA
tgtcatagactacccccatca

SEQ ID NO: 36198 - DNA, 21 bp, synthetic construct
  source 1..21: mol_type = other DNA
tggacacccatgtgtaaaccg

SEQ ID NO: 36199 - DNA, 21 bp, synthetic construct
  source 1..21: mol_type = other DNA
agcgacggggtgagttattgg

SEQ ID NO: 36200 - DNA, 21 bp, synthetic construct
  source 1..21: mol_type = other DNA
tacaaagggtcgtgtgagcaa

SEQ ID NO: 36201 - DNA, 21 bp, synthetic construct
  source 1..21: mol_type = other DNA
atgagcatgactacggacaat

SEQ ID NO: 36202 - DNA, 21 bp, synthetic construct
  source 1..21: mol_type = other DNA
tatagtcgtataggacctttt

SEQ ID NO: 36203 - DNA, 21 bp, synthetic construct
  source 1..21: mol_type = other DNA
tggtctgctattacttgcaat

SEQ ID NO: 36204 - DNA, 21 bp, synthetic construct
  source 1..21: mol_type = other DNA
agaagtgagttcagcgcattc

SEQ ID NO: 36205 - DNA, 21 bp, synthetic construct
  source 1..21: mol_type = other DNA
tgcaaggggtccatggagcag

SEQ ID NO: 36206 - DNA, 21 bp, synthetic construct
  source 1..21: mol_type = other DNA
gatactcttttacatctgaga

SEQ ID NO: 36207 - DNA, 21 bp, synthetic construct
  source 1..21: mol_type = other DNA
tgcggtatgttatgcacgtcc

SEQ ID NO: 36208 - DNA, 21 bp, synthetic construct
  source 1..21: mol_type = other DNA
tgcaaaccccagaatagctcg

SEQ ID NO: 36209 - DNA, 21 bp, synthetic construct
  source 1..21: mol_type = other DNA
tgtaaaggtgaatccgccatt

SEQ ID NO: 36210 - DNA, 21 bp, synthetic construct
  source 1..21: mol_type = other DNA
ggttgtcgtaaaggcgatatc

SEQ ID NO: 36211 - DNA, 21 bp, synthetic construct
  source 1..21: mol_type = other DNA
ggaaatacaggcatttgttac

SEQ ID NO: 36212 - DNA, 21 bp, synthetic construct
  source 1..21: mol_type = other DNA
tacgaacccggttgtaaatgg

SEQ ID NO: 36213 - DNA, 21 bp, synthetic construct
  source 1..21: mol_type = other DNA
aaggacgattacgttcccttt

SEQ ID NO: 36214 - DNA, 21 bp, synthetic construct
  source 1..21: mol_type = other DNA
cgggacgagtatacgagcttc

SEQ ID NO: 36215 - DNA, 21 bp, synthetic construct
  source 1..21: mol_type = other DNA
gtccccgactttgttaaatgg

SEQ ID NO: 36216 - DNA, 21 bp, synthetic construct
  source 1..21: mol_type = other DNA
gggaacaaacactgcatggac

SEQ ID NO: 36217 - DNA, 21 bp, synthetic construct
  source 1..21: mol_type = other DNA
tgtaataaacccatgtatgca

SEQ ID NO: 36218 - DNA, 21 bp, synthetic construct
  source 1..21: mol_type = other DNA
acttatgacaacgtcttcaga

SEQ ID NO: 36219 - DNA, 21 bp, synthetic construct
  source 1..21: mol_type = other DNA
gtcagtgagttcaactcctac

SEQ ID NO: 36220 - DNA, 21 bp, synthetic construct
  source 1..21: mol_type = other DNA
tccacagagcgcgtttgcaga

SEQ ID NO: 36221 - DNA, 21 bp, synthetic construct
  source 1..21: mol_type = other DNA
aaggacgagtatactatgtat

SEQ ID NO: 36222 - DNA, 21 bp, synthetic construct
  source 1..21: mol_type = other DNA
taccacatcaaaagttgtgat

SEQ ID NO: 36223 - DNA, 21 bp, synthetic construct
  source 1..21: mol_type = other DNA
ttccatcgcatgaactcaaac

SEQ ID NO: 36224 - DNA, 21 bp, synthetic construct
  source 1..21: mol_type = other DNA
tgtaaggagggttgctgtaca

SEQ ID NO: 36225 - DNA, 21 bp, synthetic construct
  source 1..21: mol_type = other DNA
agagatgaatatagcgtttgg

SEQ ID NO: 36226 - DNA, 21 bp, synthetic construct
  source 1..21: mol_type = other DNA
ggctcggaaatgagccattgg

SEQ ID NO: 36227 - DNA, 21 bp, synthetic construct
  source 1..21: mol_type = other DNA
ccaatggaaagcccatcgtgg

SEQ ID NO: 36228 - DNA, 21 bp, synthetic construct
  source 1..21: mol_type = other DNA
ggaatgggaacctcgttgtgg

SEQ ID NO: 36229 - DNA, 21 bp, synthetic construct
  source 1..21: mol_type = other DNA
tgcaaggcggggtgttgcgct

SEQ ID NO: 36230 - DNA, 21 bp, synthetic construct
  source 1..21: mol_type = other DNA
tactttaccggacggtgggat

SEQ ID NO: 36231 - DNA, 21 bp, synthetic construct
  source 1..21: mol_type = other DNA
aggactcctacgtgcgtcaga

SEQ ID NO: 36232 - DNA, 21 bp, synthetic construct
  source 1..21: mol_type = other DNA
gaatggtccgcaatctgtaaa

SEQ ID NO: 36233 - DNA, 21 bp, synthetic construct
  source 1..21: mol_type = other DNA
tgtaagggttcgtgggagcaa

SEQ ID NO: 36234 - DNA, 21 bp, synthetic construct
  source 1..21: mol_type = other DNA
tactggagcggcatacatctc

SEQ ID NO: 36235 - DNA, 21 bp, synthetic construct
  source 1..21: mol_type = other DNA
tgctgtattaagaaatgtccg

SEQ ID NO: 36236 - DNA, 21 bp, synthetic construct
  source 1..21: mol_type = other DNA
ggtggtgagttcagtacctgg

SEQ ID NO: 36237 - DNA, 21 bp, synthetic construct
  source 1..21: mol_type = other DNA
tgcctcggtggatgctgttct

SEQ ID NO: 36238 - DNA, 21 bp, synthetic construct
  source 1..21: mol_type = other DNA
tgctcaagggacggtgagaac

SEQ ID NO: 36239 - DNA, 21 bp, synthetic construct
  source 1..21: mol_type = other DNA
tattctcggaagaaccttaat

SEQ ID NO: 36240 - DNA, 21 bp, synthetic construct
  source 1..21: mol_type = other DNA
tgtaaacctggaatgcggctc

SEQ ID NO: 36241 - protein, 7 aa, synthetic construct
CRPPPRL

SEQ ID NO: 36242 - protein, 7 aa, synthetic construct
CSKKATN

SEQ ID NO: 36243 - protein, 7 aa, synthetic construct
LHKLANN

SEQ ID NO: 36244 - protein, 7 aa, synthetic construct
MTGLSCL

SEQ ID NO: 36245 - protein, 7 aa, synthetic construct
LCKPCLH

SEQ ID NO: 36246 - protein, 7 aa, synthetic construct
LHKLSIN

SEQ ID NO: 36247 - protein, 7 aa, synthetic construct
LSKLSFN

SEQ ID NO: 36248 - protein, 7 aa, synthetic construct
IALKGWD

SEQ ID NO: 36249 - protein, 7 aa, synthetic construct
LSKLSIN

SEQ ID NO: 36250 - protein, 7 aa, synthetic construct
LHKLTVN

SEQ ID NO: 36251 - protein, 7 aa, synthetic construct
LHKLGDN

SEQ ID NO: 36252 - protein, 7 aa, synthetic construct
LHKLSVN

SEQ ID NO: 36253 - protein, 7 aa, synthetic construct
LHKLSPN

SEQ ID NO: 36254 - protein, 7 aa, synthetic construct
CKSGCCP

SEQ ID NO: 36255 - protein, 7 aa, synthetic construct
LHKLMPD

SEQ ID NO: 36256 - protein, 7 aa, synthetic construct
RLVDVFP

SEQ ID NO: 36257 - protein, 7 aa, synthetic construct
LHKLSEN

SEQ ID NO: 36258 - protein, 7 aa, synthetic construct
YSKLGPD

SEQ ID NO: 36259 - protein, 7 aa, synthetic construct
LHRLLDD

SEQ ID NO: 36260 - protein, 7 aa, synthetic construct
LHKLSMN

SEQ ID NO: 36261 - protein, 7 aa, synthetic construct
LSKLSYN

SEQ ID NO: 36262 - protein, 7 aa, synthetic construct
LHKLAQN

SEQ ID NO: 36263 - protein, 7 aa, synthetic construct
LTRLSAN

SEQ ID NO: 36264 - protein, 7 aa, synthetic construct
RLEDVFP

SEQ ID NO: 36265 - protein, 7 aa, synthetic construct
LHKLSFD

SEQ ID NO: 36266 - protein, 7 aa, synthetic construct
LHKLMNN

SEQ ID NO: 36267 - protein, 7 aa, synthetic construct
REDFVQW

SEQ ID NO: 36268 - protein, 7 aa, synthetic construct
LHKLSTN

SEQ ID NO: 36269 - protein, 7 aa, synthetic construct
LAKTGYN

SEQ ID NO: 36270 - protein, 7 aa, synthetic construct
LSRLGPD

SEQ ID NO: 36271 - protein, 7 aa, synthetic construct
RLESAIW

SEQ ID NO: 36272 - protein, 7 aa, synthetic construct
VLSASTW

SEQ ID NO: 36273 - protein, 7 aa, synthetic construct
VNDYTIF

SEQ ID NO: 36274 - protein, 7 aa, synthetic construct
LSRIGPD

SEQ ID NO: 36275 - protein, 7 aa, synthetic construct
LHKLGEN

SEQ ID NO: 36276 - protein, 7 aa, synthetic construct
PMEARSW

SEQ ID NO: 36277 - protein, 7 aa, synthetic construct
LHKLSPL

SEQ ID NO: 36278 - protein, 7 aa, synthetic construct
LHKLSLN

SEQ ID NO: 36279 - protein, 7 aa, synthetic construct
LHKLLND

SEQ ID NO: 36280 - protein, 7 aa, synthetic construct
LHKLSID

SEQ ID NO: 36281 - protein, 7 aa, synthetic construct
LHKLMPN

SEQ ID NO: 36282 - protein, 7 aa, synthetic construct
ILSSTTW

SEQ ID NO: 36283 - protein, 7 aa, synthetic construct
RTPTCKP

SEQ ID NO: 36284 - protein, 7 aa, synthetic construct
CAPDHRE

SEQ ID NO: 36285 - protein, 7 aa, synthetic construct
LHKLSVD

SEQ ID NO: 36286 - protein, 7 aa, synthetic construct
LHKLNNN

SEQ ID NO: 36287 - protein, 7 aa, synthetic construct
LAKSGPN

SEQ ID NO: 36288 - protein, 7 aa, synthetic construct
LSKLSPN

SEQ ID NO: 36289 - protein, 7 aa, synthetic construct
RTIDVFP

SEQ ID NO: 36290 - protein, 7 aa, synthetic construct
LHKLSPD

SEQ ID NO: 36291 - protein, 7 aa, synthetic construct
LTKLSPN

SEQ ID NO: 36292 - protein, 7 aa, synthetic construct
LTRLSPN

SEQ ID NO: 36293 - protein, 7 aa, synthetic construct
LHKLNPD

SEQ ID NO: 36294 - protein, 7 aa, synthetic construct
LHKLSHD

SEQ ID NO: 36295 - protein, 7 aa, synthetic construct
MHKLSPN

SEQ ID NO: 36296 - protein, 7 aa, synthetic construct
RTPEVFP

SEQ ID NO: 36297 - protein, 7 aa, synthetic construct
YLKSDTN

SEQ ID NO: 36298 - protein, 7 aa, synthetic construct
LCKPCLI

SEQ ID NO: 36299 - protein, 7 aa, synthetic construct
FHKLGIN

SEQ ID NO: 36300 - protein, 7 aa, synthetic construct
YVKSDVN

SEQ ID NO: 36301 - protein, 7 aa, synthetic construct
FHKLGPD

SEQ ID NO: 36302 - protein, 7 aa, synthetic construct
NALKGWD

SEQ ID NO: 36303 - protein, 7 aa, synthetic construct
LHKLQQN

SEQ ID NO: 36304 - protein, 7 aa, synthetic construct
LSKLSQN

SEQ ID NO: 36305 - protein, 7 aa, synthetic construct
LHKAGPN

SEQ ID NO: 36306 - protein, 7 aa, synthetic construct
YSKVGPK

SEQ ID NO: 36307 - protein, 7 aa, synthetic construct
PLMSRDW

SEQ ID NO: 36308 - protein, 7 aa, synthetic construct
KDEFTTF

SEQ ID NO: 36309 - protein, 7 aa, synthetic construct
YVKSQTG

SEQ ID NO: 36310 - protein, 7 aa, synthetic construct
RTLDVFP

SEQ ID NO: 36311 - protein, 7 aa, synthetic construct
LTRISPD

SEQ ID NO: 36312 - protein, 7 aa, synthetic construct
MHKLSVN

SEQ ID NO: 36313 - protein, 7 aa, synthetic construct
YFTGIVA

SEQ ID NO: 36314 - protein, 7 aa, synthetic construct
YVKSQLG

SEQ ID NO: 36315 - protein, 7 aa, synthetic construct
LHKLSTD

SEQ ID NO: 36316 - protein, 7 aa, synthetic construct
LHAKLPN

SEQ ID NO: 36317 - protein, 7 aa, synthetic construct
LHRLNPD

SEQ ID NO: 36318 - protein, 7 aa, synthetic construct
LARTGPD

SEQ ID NO: 36319 - protein, 7 aa, synthetic construct
RDETVFP

SEQ ID NO: 36320 - protein, 7 aa, synthetic construct
YSKVGPD

SEQ ID NO: 36321 - protein, 7 aa, synthetic construct
LSKLSDN

SEQ ID NO: 36322 - protein, 7 aa, synthetic construct
ILSSSNW

SEQ ID NO: 36323 - protein, 7 aa, synthetic construct
KDDFSTW

SEQ ID NO: 36324 - protein, 7 aa, synthetic construct
LHRKGID

SEQ ID NO: 36325 - protein, 7 aa, synthetic construct
YVKSDPG

SEQ ID NO: 36326 - protein, 7 aa, synthetic construct
LFDGTGP

SEQ ID NO: 36327 - protein, 7 aa, synthetic construct
EMASHGW

SEQ ID NO: 36328 - protein, 7 aa, synthetic construct
KDDFTSF

SEQ ID NO: 36329 - protein, 7 aa, synthetic construct
ILTSATW

SEQ ID NO: 36330 - protein, 7 aa, synthetic construct
YSKLNPL

SEQ ID NO: 36331 - protein, 7 aa, synthetic construct
LARLGPN

SEQ ID NO: 36332 - protein, 7 aa, synthetic construct
GGIGSVW

SEQ ID NO: 36333 - protein, 7 aa, synthetic construct
RIIDAFP

SEQ ID NO: 36334 - protein, 7 aa, synthetic construct
VLSSANW

SEQ ID NO: 36335 - protein, 7 aa, synthetic construct
RLADVFP

SEQ ID NO: 36336 - protein, 7 aa, synthetic construct
KDDFTTY

SEQ ID NO: 36337 - protein, 7 aa, synthetic construct
LFDGTAS

SEQ ID NO: 36338 - protein, 7 aa, synthetic construct
KDDFTTF

SEQ ID NO: 36339 - protein, 7 aa, synthetic construct
IATLGWD

SEQ ID NO: 36340 - protein, 7 aa, synthetic construct
YVKSDRG

SEQ ID NO: 36341 - protein, 7 aa, synthetic construct
YFTGILA

SEQ ID NO: 36342 - protein, 7 aa, synthetic construct
VLSSSMW

SEQ ID NO: 36343 - protein, 7 aa, synthetic construct
YVKSQTN

SEQ ID NO: 36344 - protein, 7 aa, synthetic construct
YSKAGGG

SEQ ID NO: 36345 - protein, 7 aa, synthetic construct
RLIDAFP

SEQ ID NO: 36346 - protein, 7 aa, synthetic construct
CTSKTLH

SEQ ID NO: 36347 - protein, 7 aa, synthetic construct
LSRIGPN

SEQ ID NO: 36348 - protein, 7 aa, synthetic construct
YFTGILE

SEQ ID NO: 36349 - protein, 7 aa, synthetic construct
RLEDAFP

SEQ ID NO: 36350 - protein, 7 aa, synthetic construct
LHKLNEN

SEQ ID NO: 36351 - protein, 7 aa, synthetic construct
ILSSSTW

SEQ ID NO: 36352 - protein, 7 aa, synthetic construct
RDDFVTW

SEQ ID NO: 36353 - protein, 7 aa, synthetic construct
VATKGWD

SEQ ID NO: 36354 - protein, 7 aa, synthetic construct
MHKLGVN

SEQ ID NO: 36355 - protein, 7 aa, synthetic construct
IMESAVW

SEQ ID NO: 36356 - protein, 7 aa, synthetic construct
RGLEGFD

SEQ ID NO: 36357 - protein, 7 aa, synthetic construct
YVKSDHG

SEQ ID NO: 36358 - protein, 7 aa, synthetic construct
YVKSQAG

SEQ ID NO: 36359 - protein, 7 aa, synthetic construct
LSRVGFD

SEQ ID NO: 36360 - protein, 7 aa, synthetic construct
LHKAGHN

SEQ ID NO: 36361 - protein, 7 aa, synthetic construct
KDEFSSW

SEQ ID NO: 36362 - protein, 7 aa, synthetic construct
VKSTNGV

SEQ ID NO: 36363 - protein, 7 aa, synthetic construct
ILSSQSW

SEQ ID NO: 36364 - protein, 7 aa, synthetic construct
LCKPCLQ

SEQ ID NO: 36365 - protein, 7 aa, synthetic construct
DLSSAKW

SEQ ID NO: 36366 - protein, 7 aa, synthetic construct
VASKGWD

SEQ ID NO: 36367 - protein, 7 aa, synthetic construct
KDDFTTW

SEQ ID NO: 36368 - protein, 7 aa, synthetic construct
NLASATW

SEQ ID NO: 36369 - protein, 7 aa, synthetic construct
LHRLGLD

SEQ ID NO: 36370 - protein, 7 aa, synthetic construct
EMASIKW

SEQ ID NO: 36371 - protein, 7 aa, synthetic construct
IAHLGWD

SEQ ID NO: 36372 - protein, 7 aa, synthetic construct
YFTGIIE

SEQ ID NO: 36373 - protein, 7 aa, synthetic construct
YTKTQTN

SEQ ID NO: 36374 - protein, 7 aa, synthetic construct
LSKLHTN

SEQ ID NO: 36375 - protein, 7 aa, synthetic construct
LSKASHN

SEQ ID NO: 36376 - protein, 7 aa, synthetic construct
KDEFLSW

SEQ ID NO: 36377 - protein, 7 aa, synthetic construct
YSKLNPM

SEQ ID NO: 36378 - protein, 7 aa, synthetic construct
LSRVGLN

SEQ ID NO: 36379 - protein, 7 aa, synthetic construct
YFTGIVE

SEQ ID NO: 36380 - protein, 7 aa, synthetic construct
YVKSDTS

SEQ ID NO: 36381 - protein, 7 aa, synthetic construct
PLASSTW

SEQ ID NO: 36382 - protein, 7 aa, synthetic construct
LCKPCLG

SEQ ID NO: 36383 - protein, 7 aa, synthetic construct
YSKLNPT

SEQ ID NO: 36384 - protein, 7 aa, synthetic construct
KDDFVSW

SEQ ID NO: 36385 - protein, 7 aa, synthetic construct
YHKLNPD

SEQ ID NO: 36386 - protein, 7 aa, synthetic construct
KDEFTGY

SEQ ID NO: 36387 - protein, 7 aa, synthetic construct
FHKLSPN

SEQ ID NO: 36388 - protein, 7 aa, synthetic construct
IANKGWD

SEQ ID NO: 36389 - protein, 7 aa, synthetic construct
RTETVFP

SEQ ID NO: 36390 - protein, 7 aa, synthetic construct
KDEFSTY

SEQ ID NO: 36391 - protein, 7 aa, synthetic construct
FHKLSLN

SEQ ID NO: 36392 - protein, 7 aa, synthetic construct
ILESRTW

SEQ ID NO: 36393 - protein, 7 aa, synthetic construct
REIDVYP

SEQ ID NO: 36394 - protein, 7 aa, synthetic construct
YSKLQAN

SEQ ID NO: 36395 - protein, 7 aa, synthetic construct
LTRLHPD

SEQ ID NO: 36396 - protein, 7 aa, synthetic construct
VANKGWD

SEQ ID NO: 36397 - protein, 7 aa, synthetic construct
VSEFLSY

SEQ ID NO: 36398 - protein, 7 aa, synthetic construct
YFTGKIA

SEQ ID NO: 36399 - protein, 7 aa, synthetic construct
PMASSTW

SEQ ID NO: 36400 - protein, 7 aa, synthetic construct
EALEGRD

SEQ ID NO: 36401 - protein, 7 aa, synthetic construct
YIKSQPG

SEQ ID NO: 36402 - protein, 7 aa, synthetic construct
RGLEGYD

SEQ ID NO: 36403 - protein, 7 aa, synthetic construct
RTPLVFP

SEQ ID NO: 36404 - protein, 7 aa, synthetic construct
WTPYCKA

SEQ ID NO: 36405 - protein, 7 aa, synthetic construct
YVKSDSM

SEQ ID NO: 36406 - protein, 7 aa, synthetic construct
KDDFVAW

SEQ ID NO: 36407 - protein, 7 aa, synthetic construct
NALEGRD

SEQ ID NO: 36408 - protein, 7 aa, synthetic construct
KDEFHSF

SEQ ID NO: 36409 - protein, 7 aa, synthetic construct
RGEHVFP

SEQ ID NO: 36410 - protein, 7 aa, synthetic construct
LFDGTPA

SEQ ID NO: 36411 - protein, 7 aa, synthetic construct
YHKLNLD

SEQ ID NO: 36412 - protein, 7 aa, synthetic construct
KMDSVRW

SEQ ID NO: 36413 - protein, 7 aa, synthetic construct
LHRLGPD

SEQ ID NO: 36414 - protein, 7 aa, synthetic construct
YVKSDAL

SEQ ID NO: 36415 - protein, 7 aa, synthetic construct
LSRVGYD

SEQ ID NO: 36416 - protein, 7 aa, synthetic construct
KDDFTSW

SEQ ID NO: 36417 - protein, 7 aa, synthetic construct
CKPREGT

SEQ ID NO: 36418 - protein, 7 aa, synthetic construct
LHKKGPD

SEQ ID NO: 36419 - protein, 7 aa, synthetic construct
LHKLNPL

SEQ ID NO: 36420 - protein, 7 aa, synthetic construct
KDDFTVY

SEQ ID NO: 36421 - protein, 7 aa, synthetic construct
LMADAYP

SEQ ID NO: 36422 - protein, 7 aa, synthetic construct
YSKLSDN

SEQ ID NO: 36423 - protein, 7 aa, synthetic construct
VQSTNGV

SEQ ID NO: 36424 - protein, 7 aa, synthetic construct
RLLDAYP

SEQ ID NO: 36425 - protein, 7 aa, synthetic construct
KDDFTMF

SEQ ID NO: 36426 - protein, 7 aa, synthetic construct
YVKSDMK

SEQ ID NO: 36427 - protein, 7 aa, synthetic construct
REDAVRW

SEQ ID NO: 36428 - protein, 7 aa, synthetic construct
REEGVSW

SEQ ID NO: 36429 - protein, 7 aa, synthetic construct
VKSTNGI

SEQ ID NO: 36430 - protein, 7 aa, synthetic construct
LRMSGCP

SEQ ID NO: 36431 - protein, 7 aa, synthetic construct
VESTNGR

SEQ ID NO: 36432 - protein, 7 aa, synthetic construct
LFDGTAA

SEQ ID NO: 36433 - protein, 7 aa, synthetic construct
YSAIGPN

SEQ ID NO: 36434 - protein, 7 aa, synthetic construct
LCKPCDT

SEQ ID NO: 36435 - protein, 7 aa, synthetic construct
LCKPCVT

SEQ ID NO: 36436 - protein, 7 aa, synthetic construct
RLDDVFP

SEQ ID NO: 36437 - protein, 7 aa, synthetic construct
LCKPCLD

SEQ ID NO: 36438 - protein, 7 aa, synthetic construct
LCKPCPT

SEQ ID NO: 36439 - protein, 7 aa, synthetic construct
YVKSQMG

SEQ ID NO: 36440 - protein, 7 aa, synthetic construct
VLSDRIW

SEQ ID NO: 36441 - protein, 7 aa, synthetic construct
LCKPCTT

SEQ ID NO: 36442 - protein, 7 aa, synthetic construct
LSRVGPN

SEQ ID NO: 36443 - protein, 7 aa, synthetic construct
RTDDVFP

SEQ ID NO: 36444 - protein, 7 aa, synthetic construct
DMASASW

SEQ ID NO: 36445 - protein, 7 aa, synthetic construct
YHAKLPN

SEQ ID NO: 36446 - protein, 7 aa, synthetic construct
ILASRDW

SEQ ID NO: 36447 - protein, 7 aa, synthetic construct
QLSSSTW

SEQ ID NO: 36448 - protein, 7 aa, synthetic construct
CTKSCCP

SEQ ID NO: 36449 - protein, 7 aa, synthetic construct
LHRLSPP

SEQ ID NO: 36450 - protein, 7 aa, synthetic construct
TLSSATW

SEQ ID NO: 36451 - protein, 7 aa, synthetic construct
VATKGAG

SEQ ID NO: 36452 - protein, 7 aa, synthetic construct
LHVKLPD

SEQ ID NO: 36453 - protein, 7 aa, synthetic construct
KDDFTAW

SEQ ID NO: 36454 - protein, 7 aa, synthetic construct
IMSSATW

SEQ ID NO: 36455 - protein, 7 aa, synthetic construct
DMASKTW

SEQ ID NO: 36456 - protein, 7 aa, synthetic construct
YVKSDKM

SEQ ID NO: 36457 - protein, 7 aa, synthetic construct
YVKSDVR

SEQ ID NO: 36458 - protein, 7 aa, synthetic construct
YVKSDSR

SEQ ID NO: 36459 - protein, 7 aa, synthetic construct
LARSGPN

SEQ ID NO: 36460 - protein, 7 aa, synthetic construct
YVKSQTM

SEQ ID NO: 36461 - protein, 7 aa, synthetic construct
KDEFSTW

SEQ ID NO: 36462 - protein, 7 aa, synthetic construct
DLSSSKW

SEQ ID NO: 36463 - protein, 7 aa, synthetic construct
RGETVFP

SEQ ID NO: 36464 - protein, 7 aa, synthetic construct
KDDFTHF

SEQ ID NO: 36465 - protein, 7 aa, synthetic construct
YVKSQPT

SEQ ID NO: 36466 - protein, 7 aa, synthetic construct
LCRPCSH

SEQ ID NO: 36467 - protein, 7 aa, synthetic construct
YVKSQML

SEQ ID NO: 36468 - protein, 7 aa, synthetic construct
GGLGSHW

SEQ ID NO: 36469 - protein, 7 aa, synthetic construct
YHVKSPN

SEQ ID NO: 36470 - protein, 7 aa, synthetic construct
RTDDTFP

SEQ ID NO: 36471 - protein, 7 aa, synthetic construct
YFTGVAL

SEQ ID NO: 36472 - protein, 7 aa, synthetic construct
DMSASTW

SEQ ID NO: 36473 - protein, 7 aa, synthetic construct
YHKLGPQ

SEQ ID NO: 36474 - protein, 7 aa, synthetic construct
IMASANW

SEQ ID NO: 36475 - protein, 7 aa, synthetic construct
YFTGFIE

SEQ ID NO: 36476 - protein, 7 aa, synthetic construct
YFTGVKE

SEQ ID NO: 36477 - protein, 7 aa, synthetic construct
YSKVGTN

SEQ ID NO: 36478 - protein, 7 aa, synthetic construct
YVKSQTS

SEQ ID NO: 36479 - protein, 7 aa, synthetic construct
RTDTVYP

SEQ ID NO: 36480 - protein, 7 aa, synthetic construct
RMLDAFP

SEQ ID NO: 36481 - protein, 7 aa, synthetic construct
KDDFSTY

SEQ ID NO: 36482 - protein, 7 aa, synthetic construct
YLKSQMT

SEQ ID NO: 36483 - protein, 7 aa, synthetic construct
YFSGIIE

SEQ ID NO: 36484 - protein, 7 aa, synthetic construct
MFDGTAA

SEQ ID NO: 36485 - protein, 7 aa, synthetic construct
YTKLQYN

SEQ ID NO: 36486 - protein, 7 aa, synthetic construct
RTETVYP

SEQ ID NO: 36487 - protein, 7 aa, synthetic construct
YSKLSLN

SEQ ID NO: 36488 - protein, 7 aa, synthetic construct
YVKSDRH

SEQ ID NO: 36489 - protein, 7 aa, synthetic construct
YVKSDMR

SEQ ID NO: 36490 - protein, 7 aa, synthetic construct
FHKLSTN

SEQ ID NO: 36491 - protein, 7 aa, synthetic construct
LARTGLN

SEQ ID NO: 36492 - protein, 7 aa, synthetic construct
LCRPCFE

SEQ ID NO: 36493 - protein, 7 aa, synthetic construct
LCKPCAT

SEQ ID NO: 36494 - protein, 7 aa, synthetic construct
REDMVRW

SEQ ID NO: 36495 - protein, 7 aa, synthetic construct
LSRVSIN

SEQ ID NO: 36496 - protein, 7 aa, synthetic construct
YVKSDTR

SEQ ID NO: 36497 - protein, 7 aa, synthetic construct
YTKSQTN

SEQ ID NO: 36498 - protein, 7 aa, synthetic construct
YFTGIME

SEQ ID NO: 36499 - protein, 7 aa, synthetic construct
RNLDVFP

SEQ ID NO: 36500 - protein, 7 aa, synthetic construct
VMESSKW

SEQ ID NO: 36501 - protein, 7 aa, synthetic construct
DLSSSSW

SEQ ID NO: 36502 - protein, 7 aa, synthetic construct
LFSGEGP

SEQ ID NO: 36503 - protein, 7 aa, synthetic construct
LSRLAIN

SEQ ID NO: 36504 - protein, 7 aa, synthetic construct
YHKMLPD

SEQ ID NO: 36505 - protein, 7 aa, synthetic construct
NLSSSTW

SEQ ID NO: 36506 - protein, 7 aa, synthetic construct
RMIDVYP

SEQ ID NO: 36507 - protein, 7 aa, synthetic construct
DLQARSW

SEQ ID NO: 36508 - protein, 7 aa, synthetic construct
FVKSDNR

SEQ ID NO: 36509 - protein, 7 aa, synthetic construct
RGENVFP

SEQ ID NO: 36510 - protein, 7 aa, synthetic construct
YHKLQFD

SEQ ID NO: 36511 - protein, 7 aa, synthetic construct
KSEFTTY

SEQ ID NO: 36512 - protein, 7 aa, synthetic construct
RLADAFP

SEQ ID NO: 36513 - protein, 7 aa, synthetic construct
FACMNSN

SEQ ID NO: 36514 - protein, 7 aa, synthetic construct
LTRVAPN

SEQ ID NO: 36515 - protein, 7 aa, synthetic construct
YFTGQVE

SEQ ID NO: 36516 - protein, 7 aa, synthetic construct
RNEFCTF

SEQ ID NO: 36517 - protein, 7 aa, synthetic construct
LCKSCLT

SEQ ID NO: 36518 - protein, 7 aa, synthetic construct
YFSGIPL

SEQ ID NO: 36519 - protein, 7 aa, synthetic construct
LHRLLHD

SEQ ID NO: 36520 - protein, 7 aa, synthetic construct
YHKLNPP

SEQ ID NO: 36521 - protein, 7 aa, synthetic construct
YAKHGPN

SEQ ID NO: 36522 - protein, 7 aa, synthetic construct
REDHVYW

SEQ ID NO: 36523 - protein, 7 aa, synthetic construct
YHKLNDN

SEQ ID NO: 36524 - protein, 7 aa, synthetic construct
LHKKSPD

SEQ ID NO: 36525 - protein, 7 aa, synthetic construct
VESREGI

SEQ ID NO: 36526 - protein, 7 aa, synthetic construct
YVKSDHM

SEQ ID NO: 36527 - protein, 7 aa, synthetic construct
YEPGCDE

SEQ ID NO: 36528 - protein, 7 aa, synthetic construct
VMPDAFP

SEQ ID NO: 36529 - protein, 7 aa, synthetic construct
IMSSNIW

SEQ ID NO: 36530 - protein, 7 aa, synthetic construct
LINDAYP

SEQ ID NO: 36531 - protein, 7 aa, synthetic construct
RTSDVYP

SEQ ID NO: 36532 - protein, 7 aa, synthetic construct
RLESTLW

SEQ ID NO: 36533 - protein, 7 aa, synthetic construct
IMASHGW

SEQ ID NO: 36534 - protein, 7 aa, synthetic construct
LHRLSLD

SEQ ID NO: 36535 - protein, 7 aa, synthetic construct
NGAGCCR

SEQ ID NO: 36536 - protein, 7 aa, synthetic construct
YHKLDNN

SEQ ID NO: 36537 - protein, 7 aa, synthetic construct
YFTGKVA

SEQ ID NO: 36538 - protein, 7 aa, synthetic construct
YVKSDSF

SEQ ID NO: 36539 - protein, 7 aa, synthetic construct
LHRLSAD

SEQ ID NO: 36540 - protein, 7 aa, synthetic construct
LHKMSMN

SEQ ID NO: 36541 - protein, 7 aa, synthetic construct
RDIDVFP

SEQ ID NO: 36542 - protein, 7 aa, synthetic construct
WWSGVME

SEQ ID NO: 36543 - protein, 7 aa, synthetic construct
PMESHSW

SEQ ID NO: 36544 - protein, 7 aa, synthetic construct
PMGSSTW

SEQ ID NO: 36545 - protein, 7 aa, synthetic construct
DLSSQTW

SEQ ID NO: 36546 - protein, 7 aa, synthetic construct
LHRLGMD

SEQ ID NO: 36547 - protein, 7 aa, synthetic construct
GSEFQTY

SEQ ID NO: 36548 - protein, 7 aa, synthetic construct
YVKHDVK

SEQ ID NO: 36549 - protein, 7 aa, synthetic construct
CGKRCVP

SEQ ID NO: 36550 - protein, 7 aa, synthetic construct
RTPQVFP

SEQ ID NO: 36551 - protein, 7 aa, synthetic construct
RGPEVFP

SEQ ID NO: 36552 - protein, 7 aa, synthetic construct
LARTGYD

SEQ ID NO: 36553 - protein, 7 aa, synthetic construct
LCKPCQT

SEQ ID NO: 36554 - protein, 7 aa, synthetic construct
LHRLSID

SEQ ID NO: 36555 - protein, 7 aa, synthetic construct
LSRVGHD

SEQ ID NO: 36556 - protein, 7 aa, synthetic construct
VMPDAYP

SEQ ID NO: 36557 - protein, 7 aa, synthetic construct
REEHVFP

SEQ ID NO: 36558 - protein, 7 aa, synthetic construct
ILSSSSW

SEQ ID NO: 36559 - protein, 7 aa, synthetic construct
YFTGIKD

SEQ ID NO: 36560 - protein, 7 aa, synthetic construct
LFDGTSA

SEQ ID NO: 36561 - protein, 7 aa, synthetic construct
YFTGITE

SEQ ID NO: 36562 - protein, 7 aa, synthetic construct
RTDHVFP

SEQ ID NO: 36563 - protein, 7 aa, synthetic construct
MHRLLPD

SEQ ID NO: 36564 - protein, 7 aa, synthetic construct
RTNEVFP

SEQ ID NO: 36565 - protein, 7 aa, synthetic construct
LTRLHAD

SEQ ID NO: 36566 - protein, 7 aa, synthetic construct
YTKLSPN

SEQ ID NO: 36567 - protein, 7 aa, synthetic construct
MFDGTSA

SEQ ID NO: 36568 - protein, 7 aa, synthetic construct
YFTGTIE

SEQ ID NO: 36569 - protein, 7 aa, synthetic construct
RLMDAFP

SEQ ID NO: 36570 - protein, 7 aa, synthetic construct
YFTGVLA

SEQ ID NO: 36571 - protein, 7 aa, synthetic construct
LSRIGMN

SEQ ID NO: 36572 - protein, 7 aa, synthetic construct
REDTVKW

SEQ ID NO: 36573 - protein, 7 aa, synthetic construct
EMASHSW

SEQ ID NO: 36574 - protein, 7 aa, synthetic construct
YVKSDTA

SEQ ID NO: 36575 - protein, 7 aa, synthetic construct
YVKSQLS

SEQ ID NO: 36576 - protein, 7 aa, synthetic construct
LSRLSFD

SEQ ID NO: 36577 - protein, 7 aa, synthetic construct
RLDNVYP

SEQ ID NO: 36578 - protein, 7 aa, synthetic construct
REENVYP

SEQ ID NO: 36579 - protein, 7 aa, synthetic construct
RALEGYD

SEQ ID NO: 36580 - protein, 7 aa, synthetic construct
DLRAATW

SEQ ID NO: 36581 - protein, 7 aa, synthetic construct
YLKSQQS

SEQ ID NO: 36582 - protein, 7 aa, synthetic construct
YFTGKVE

SEQ ID NO: 36583 - protein, 7 aa, synthetic construct
IMMDAYP

SEQ ID NO: 36584 - protein, 7 aa, synthetic construct
LHKLHTN

SEQ ID NO: 36585 - protein, 7 aa, synthetic construct
WWSGVKE

SEQ ID NO: 36586 - protein, 7 aa, synthetic construct
IMSSANW

SEQ ID NO: 36587 - protein, 7 aa, synthetic construct
LFSGDGP

SEQ ID NO: 36588 - protein, 7 aa, synthetic construct
DLASYKW

SEQ ID NO: 36589 - protein, 7 aa, synthetic construct
DMSSSKW

SEQ ID NO: 36590 - protein, 7 aa, synthetic construct
GCRPGCG

SEQ ID NO: 36591 - protein, 7 aa, synthetic construct
RTVDTYP

SEQ ID NO: 36592 - protein, 7 aa, synthetic construct
LHRLLPD

SEQ ID NO: 36593 - protein, 7 aa, synthetic construct
RTNDVFP

SEQ ID NO: 36594 - protein, 7 aa, synthetic construct
LHRLGAD

SEQ ID NO: 36595 - protein, 7 aa, synthetic construct
YIKSQLN

SEQ ID NO: 36596 - protein, 7 aa, synthetic construct
YSKLDRN

SEQ ID NO: 36597 - protein, 7 aa, synthetic construct
IESSNGR

SEQ ID NO: 36598 - protein, 7 aa, synthetic construct
LHRLSPL

SEQ ID NO: 36599 - protein, 7 aa, synthetic construct
PMESSKW

SEQ ID NO: 36600 - protein, 7 aa, synthetic construct
MHKLSEN

SEQ ID NO: 36601 - protein, 7 aa, synthetic construct
IHKLSAN

SEQ ID NO: 36602 - protein, 7 aa, synthetic construct
VMASSSW

SEQ ID NO: 36603 - protein, 7 aa, synthetic construct
RTEHVFP

SEQ ID NO: 36604 - protein, 7 aa, synthetic construct
VALEGRD

SEQ ID NO: 36605 - protein, 7 aa, synthetic construct
REVDVFP

SEQ ID NO: 36606 - protein, 7 aa, synthetic construct
IHRLGPD

SEQ ID NO: 36607 - protein, 7 aa, synthetic construct
YLKSQPY

SEQ ID NO: 36608 - protein, 7 aa, synthetic construct
KDEFSGY

SEQ ID NO: 36609 - protein, 7 aa, synthetic construct
LAKTAPN

SEQ ID NO: 36610 - protein, 7 aa, synthetic construct
IESTHGR

SEQ ID NO: 36611 - protein, 7 aa, synthetic construct
LHRLNPL

SEQ ID NO: 36612 - protein, 7 aa, synthetic construct
RDDFTSY

SEQ ID NO: 36613 - protein, 7 aa, synthetic construct
RGETVYP

SEQ ID NO: 36614 - protein, 7 aa, synthetic construct
RDETVYP

SEQ ID NO: 36615 - protein, 7 aa, synthetic construct
RDEFTTY

SEQ ID NO: 36616 - protein, 7 aa, synthetic construct
LSKAAFN

SEQ ID NO: 36617 - protein, 7 aa, synthetic construct
LHRLGGD

SEQ ID NO: 36618 - protein, 7 aa, synthetic construct
VESTNGA

SEQ ID NO: 36619 - protein, 7 aa, synthetic construct
LHRLSDN

SEQ ID NO: 36620 - protein, 7 aa, synthetic construct
RGPDVFP

SEQ ID NO: 36621 - protein, 7 aa, synthetic construct
LSRLSHD

SEQ ID NO: 36622 - protein, 7 aa, synthetic construct
LTRVSPD

SEQ ID NO: 36623 - protein, 7 aa, synthetic construct
RLESAAW

SEQ ID NO: 36624 - protein, 7 aa, synthetic construct
IMTDRIW

SEQ ID NO: 36625 - protein, 7 aa, synthetic construct
LRDGTPA

SEQ ID NO: 36626 - protein, 7 aa, synthetic construct
LSRIGQN

SEQ ID NO: 36627 - protein, 7 aa, synthetic construct
REDSVRW

SEQ ID NO: 36628 - protein, 7 aa, synthetic construct
LESREGI

SEQ ID NO: 36629 - protein, 7 aa, synthetic construct
LCRPCAE

SEQ ID NO: 36630 - protein, 7 aa, synthetic construct
NSLEGRD

SEQ ID NO: 36631 - protein, 7 aa, synthetic construct
VSEFLSF

SEQ ID NO: 36632 - protein, 7 aa, synthetic construct
LHRLGDD

SEQ ID NO: 36633 - protein, 7 aa, synthetic construct
RGVDVYP

SEQ ID NO: 36634 - protein, 7 aa, synthetic construct
YFTGHWE

SEQ ID NO: 36635 - protein, 7 aa, synthetic construct
YVKSDRM

SEQ ID NO: 36636 - protein, 7 aa, synthetic construct
RGDNVFP

SEQ ID NO: 36637 - protein, 7 aa, synthetic construct
LHKLSSD

SEQ ID NO: 36638 - protein, 7 aa, synthetic construct
MFDGTPA

SEQ ID NO: 36639 - protein, 7 aa, synthetic construct
LCKPCMT

SEQ ID NO: 36640 - protein, 7 aa, synthetic construct
RLMDAYP

SEQ ID NO: 36641 - protein, 7 aa, synthetic construct
ESDFKIW

SEQ ID NO: 36642 - protein, 7 aa, synthetic construct
VMEARNW

SEQ ID NO: 36643 - protein, 7 aa, synthetic construct
VLSDRLW

SEQ ID NO: 36644 - protein, 7 aa, synthetic construct
YFSGVVE

SEQ ID NO: 36645 - protein, 7 aa, synthetic construct
GSITSTW

SEQ ID NO: 36646 - protein, 7 aa, synthetic construct
YVKSQVS

SEQ ID NO: 36647 - protein, 7 aa, synthetic construct
RGPQVFP

SEQ ID NO: 36648 - protein, 7 aa, synthetic construct
YEPGCHE

SEQ ID NO: 36649 - protein, 7 aa, synthetic construct
RLMDVYP

SEQ ID NO: 36650 - protein, 7 aa, synthetic construct
PYAKSPM

SEQ ID NO: 36651 - protein, 7 aa, synthetic construct
LHKLQTD

SEQ ID NO: 36652 - protein, 7 aa, synthetic construct
LARTGMN

SEQ ID NO: 36653 - protein, 7 aa, synthetic construct
VMSSTTW

SEQ ID NO: 36654 - protein, 7 aa, synthetic construct
RTIDAFP

SEQ ID NO: 36655 - protein, 7 aa, synthetic construct
KDDFHTY

SEQ ID NO: 36656 - protein, 7 aa, synthetic construct
PYAKSVE

SEQ ID NO: 36657 - protein, 7 aa, synthetic construct
LTRLQIN

SEQ ID NO: 36658 - protein, 7 aa, synthetic construct
YFTGVLQ

SEQ ID NO: 36659 - protein, 7 aa, synthetic construct
LCKPCLM

SEQ ID NO: 36660 - protein, 7 aa, synthetic construct
PMSSSSW

SEQ ID NO: 36661 - protein, 7 aa, synthetic construct
LSKASVN

SEQ ID NO: 36662 - protein, 7 aa, synthetic construct
YVKHDPH

SEQ ID NO: 36663 - protein, 7 aa, synthetic construct
YHKLNPM

SEQ ID NO: 36664 - protein, 7 aa, synthetic construct
YLKSQPF

SEQ ID NO: 36665 - protein, 7 aa, synthetic construct
QNDFVFP

SEQ ID NO: 36666 - protein, 7 aa, synthetic construct
LHASGPN

SEQ ID NO: 36667 - protein, 7 aa, synthetic construct
FEGHVRF

SEQ ID NO: 36668 - protein, 7 aa, synthetic construct
DMSSSVW

SEQ ID NO: 36669 - protein, 7 aa, synthetic construct
ELASREW

SEQ ID NO: 36670 - protein, 7 aa, synthetic construct
RDIDVYP

SEQ ID NO: 36671 - protein, 7 aa, synthetic construct
REDSVYW

SEQ ID NO: 36672 - protein, 7 aa, synthetic construct
LHKHSQN

SEQ ID NO: 36673 - protein, 7 aa, synthetic construct
GDEFVHW

SEQ ID NO: 36674 - protein, 7 aa, synthetic construct
VMSSANW

SEQ ID NO: 36675 - protein, 7 aa, synthetic construct
LMNDAYP

SEQ ID NO: 36676 - protein, 7 aa, synthetic construct
VSTHCRA

SEQ ID NO: 36677 - protein, 7 aa, synthetic construct
YFSGIVE

SEQ ID NO: 36678 - protein, 7 aa, synthetic construct
LHRLGED

SEQ ID NO: 36679 - protein, 7 aa, synthetic construct
YLKYDPL

SEQ ID NO: 36680 - protein, 7 aa, synthetic construct
IMSASNW

SEQ ID NO: 36681 - protein, 7 aa, synthetic construct
LCKPCET

SEQ ID NO: 36682 - protein, 7 aa, synthetic construct
LCKPCLS

SEQ ID NO: 36683 - protein, 7 aa, synthetic construct
YTRLDPL

SEQ ID NO: 36684 - protein, 7 aa, synthetic construct
PMASSNW

SEQ ID NO: 36685 - protein, 7 aa, synthetic construct
YVKSQPF

SEQ ID NO: 36686 - protein, 7 aa, synthetic construct
YSRLLPD

SEQ ID NO: 36687 - protein, 7 aa, synthetic construct
VAEKGWD

SEQ ID NO: 36688 - protein, 7 aa, synthetic construct
LCKPCST

SEQ ID NO: 36689 - protein, 7 aa, synthetic construct
YHKAQMN

SEQ ID NO: 36690 - protein, 7 aa, synthetic construct
PMDSSRW

SEQ ID NO: 36691 - protein, 7 aa, synthetic construct
RKLDVYP

SEQ ID NO: 36692 - protein, 7 aa, synthetic construct
RTDDVYP

SEQ ID NO: 36693 - protein, 7 aa, synthetic construct
YHAAGPN

SEQ ID NO: 36694 - protein, 7 aa, synthetic construct
RTPQVYP

SEQ ID NO: 36695 - protein, 7 aa, synthetic construct
RGPDVYP

SEQ ID NO: 36696 - protein, 7 aa, synthetic construct
IMSSSSW

SEQ ID NO: 36697 - protein, 7 aa, synthetic construct
FHKLSNN

SEQ ID NO: 36698 - protein, 7 aa, synthetic construct
PMASATW

SEQ ID NO: 36699 - protein, 7 aa, synthetic construct
IMESRNW

SEQ ID NO: 36700 - protein, 7 aa, synthetic construct
DLRSSTW

SEQ ID NO: 36701 - protein, 7 aa, synthetic construct
RDEFTSF

SEQ ID NO: 36702 - protein, 7 aa, synthetic construct
LCAPCLT

SEQ ID NO: 36703 - protein, 7 aa, synthetic construct
NLASASW

SEQ ID NO: 36704 - protein, 7 aa, synthetic construct
YVKSQQL

SEQ ID NO: 36705 - protein, 7 aa, synthetic construct
LHKLNHD

SEQ ID NO: 36706 - protein, 7 aa, synthetic construct
YFTGIHE

SEQ ID NO: 36707 - protein, 7 aa, synthetic construct
VSEFEIY

SEQ ID NO: 36708 - protein, 7 aa, synthetic construct
LTRLHID

SEQ ID NO: 36709 - protein, 7 aa, synthetic construct
REDFVSW

SEQ ID NO: 36710 - protein, 7 aa, synthetic construct
MSRIGPN

SEQ ID NO: 36711 - protein, 7 aa, synthetic construct
APGSVRW

SEQ ID NO: 36712 - protein, 7 aa, synthetic construct
DLASREW

SEQ ID NO: 36713 - protein, 7 aa, synthetic construct
RNDDVFP

SEQ ID NO: 36714 - protein, 7 aa, synthetic construct
LSRVSDN

SEQ ID NO: 36715 - protein, 7 aa, synthetic construct
YHAKGLN

SEQ ID NO: 36716 - protein, 7 aa, synthetic construct
SMSSAIW

SEQ ID NO: 36717 - protein, 7 aa, synthetic construct
LRDGTSA

SEQ ID NO: 36718 - protein, 7 aa, synthetic construct
YFTGKLE

SEQ ID NO: 36719 - protein, 7 aa, synthetic construct
RLTDAYP

SEQ ID NO: 36720 - protein, 7 aa, synthetic construct
QMASVKW

SEQ ID NO: 36721 - protein, 7 aa, synthetic construct
RTSDVFP

SEQ ID NO: 36722 - protein, 7 aa, synthetic construct
VLSSSAW

SEQ ID NO: 36723 - protein, 7 aa, synthetic construct
LHRLGDN

SEQ ID NO: 36724 - protein, 7 aa, synthetic construct
RTPSVYP

SEQ ID NO: 36725 - protein, 7 aa, synthetic construct
IMASQTW

SEQ ID NO: 36726 - protein, 7 aa, synthetic construct
YVKSQVM

SEQ ID NO: 36727 - protein, 7 aa, synthetic construct
LCKPCIT

SEQ ID NO: 36728 - protein, 7 aa, synthetic construct
YFSGVKE

SEQ ID NO: 36729 - protein, 7 aa, synthetic construct
YHKLQVF

SEQ ID NO: 36730 - protein, 7 aa, synthetic construct
RDDFTTF

SEQ ID NO: 36731 - protein, 7 aa, synthetic construct
REDFTTW

SEQ ID NO: 36732 - protein, 7 aa, synthetic construct
KDDFVSY

SEQ ID NO: 36733 - protein, 7 aa, synthetic construct
LHRLSVV

SEQ ID NO: 36734 - protein, 7 aa, synthetic construct
DMGSHKW

SEQ ID NO: 36735 - protein, 7 aa, synthetic construct
YIKHDPM

SEQ ID NO: 36736 - protein, 7 aa, synthetic construct
YVKSQPY

SEQ ID NO: 36737 - protein, 7 aa, synthetic construct
VPEFCRP

SEQ ID NO: 36738 - protein, 7 aa, synthetic construct
RMIDAYP

SEQ ID NO: 36739 - protein, 7 aa, synthetic construct
KSDFVSW

SEQ ID NO: 36740 - protein, 7 aa, synthetic construct
RTGDAYP

SEQ ID NO: 36741 - protein, 7 aa, synthetic construct
YHKLNEN

SEQ ID NO: 36742 - protein, 7 aa, synthetic construct
LSRVGGN

SEQ ID NO: 36743 - protein, 7 aa, synthetic construct
RMEVSTW

SEQ ID NO: 36744 - protein, 7 aa, synthetic construct
RMLDAYP

SEQ ID NO: 36745 - protein, 7 aa, synthetic construct
LHRLGQD

SEQ ID NO: 36746 - protein, 7 aa, synthetic construct
LSRLSPI

SEQ ID NO: 36747 - protein, 7 aa, synthetic construct
YVRSDKG

SEQ ID NO: 36748 - protein, 7 aa, synthetic construct
LKDGTCS

SEQ ID NO: 36749 - protein, 7 aa, synthetic construct
LCKPCLL

SEQ ID NO: 36750 - protein, 7 aa, synthetic construct
LHRLSTP

SEQ ID NO: 36751 - protein, 7 aa, synthetic construct
YSKLQKN

SEQ ID NO: 36752 - protein, 7 aa, synthetic construct
FSRIGPD

SEQ ID NO: 36753 - protein, 7 aa, synthetic construct
YHKLNSN

SEQ ID NO: 36754 - protein, 7 aa, synthetic construct
YFTGTKE

SEQ ID NO: 36755 - protein, 7 aa, synthetic construct
KSDFVVY

SEQ ID NO: 36756 - protein, 7 aa, synthetic construct
VMEARDW

SEQ ID NO: 36757 - protein, 7 aa, synthetic construct
RSDFVVY

SEQ ID NO: 36758 - protein, 7 aa, synthetic construct
YFTGHID

SEQ ID NO: 36759 - protein, 7 aa, synthetic construct
CTKPCCP

SEQ ID NO: 36760 - protein, 7 aa, synthetic construct
REDGVRW

SEQ ID NO: 36761 - protein, 7 aa, synthetic construct
DMGSSVW

SEQ ID NO: 36762 - protein, 7 aa, synthetic construct
RLESREW

SEQ ID NO: 36763 - protein, 7 aa, synthetic construct
RDEFIAW

SEQ ID NO: 36764 - protein, 7 aa, synthetic construct
YSKLSMN

SEQ ID NO: 36765 - protein, 7 aa, synthetic construct
LTRLSVD

SEQ ID NO: 36766 - protein, 7 aa, synthetic construct
RDDFTTW

SEQ ID NO: 36767 - protein, 7 aa, synthetic construct
PMASQQW

SEQ ID NO: 36768 - protein, 7 aa, synthetic construct
RGPEVYP

SEQ ID NO: 36769 - protein, 7 aa, synthetic construct
LHRLGYD

SEQ ID NO: 36770 - protein, 7 aa, synthetic construct
DLESRKW

SEQ ID NO: 36771 - protein, 7 aa, synthetic construct
VLSSNIW

SEQ ID NO: 36772 - protein, 7 aa, synthetic construct
YFTGKKE

SEQ ID NO: 36773 - protein, 7 aa, synthetic construct
VSDFKIY

SEQ ID NO: 36774 - protein, 7 aa, synthetic construct
ILASATW

SEQ ID NO: 36775 - protein, 7 aa, synthetic construct
VLSSSQW

SEQ ID NO: 36776 - protein, 7 aa, synthetic construct
YFTGVIQ

SEQ ID NO: 36777 - protein, 7 aa, synthetic construct
YFTGIRE

SEQ ID NO: 36778 - protein, 7 aa, synthetic construct
YHKLNNN

SEQ ID NO: 36779 - protein, 7 aa, synthetic construct
CKDPCCG

SEQ ID NO: 36780 - protein, 7 aa, synthetic construct
YFSGITA

SEQ ID NO: 36781 - protein, 7 aa, synthetic construct
DLSSSQW

SEQ ID NO: 36782 - protein, 7 aa, synthetic construct
DMSSHKW

SEQ ID NO: 36783 - protein, 7 aa, synthetic construct
NALRGWD

SEQ ID NO: 36784 - protein, 7 aa, synthetic construct
VMESRKW

SEQ ID NO: 36785 - protein, 7 aa, synthetic construct
GDEYHSY

SEQ ID NO: 36786 - protein, 7 aa, synthetic construct
IATRGIG

SEQ ID NO: 36787 - protein, 7 aa, synthetic construct
KDEFKSW

SEQ ID NO: 36788 - protein, 7 aa, synthetic construct
LHRLTTD

SEQ ID NO: 36789 - protein, 7 aa, synthetic construct
LSRLSSD

SEQ ID NO: 36790 - protein, 7 aa, synthetic construct
YHKLNPL

SEQ ID NO: 36791 - protein, 7 aa, synthetic construct
RGDDVYP

SEQ ID NO: 36792 - protein, 7 aa, synthetic construct
VESFNGR

SEQ ID NO: 36793 - protein, 7 aa, synthetic construct
LSRTSVN

SEQ ID NO: 36794 - protein, 7 aa, synthetic construct
RGDDVFP

SEQ ID NO: 36795 - protein, 7 aa, synthetic construct
YSKLNEM

SEQ ID NO: 36796 - protein, 7 aa, synthetic construct
LSRLSPN

SEQ ID NO: 36797 - protein, 7 aa, synthetic construct
EMDSRMW

SEQ ID NO: 36798 - protein, 7 aa, synthetic construct
VMESRDW

SEQ ID NO: 36799 - protein, 7 aa, synthetic construct
RDETSHW

SEQ ID NO: 36800 - protein, 7 aa, synthetic construct
PLDSRSW

SEQ ID NO: 36801 - protein, 7 aa, synthetic construct
RDDFTMY

SEQ ID NO: 36802 - protein, 7 aa, synthetic construct
IHRLLSD

SEQ ID NO: 36803 - protein, 7 aa, synthetic construct
LHRLMED

SEQ ID NO: 36804 - protein, 7 aa, synthetic construct
LHKKGEN

SEQ ID NO: 36805 - protein, 7 aa, synthetic construct
RGESVYP

SEQ ID NO: 36806 - protein, 7 aa, synthetic construct
YFTGFMD

SEQ ID NO: 36807 - protein, 7 aa, synthetic construct
YVKSQMM

SEQ ID NO: 36808 - protein, 7 aa, synthetic construct
PMESVKW

SEQ ID NO: 36809 - protein, 7 aa, synthetic construct
YFAGIKE

SEQ ID NO: 36810 - protein, 7 aa, synthetic construct
YFTGIHA

SEQ ID NO: 36811 - protein, 7 aa, synthetic construct
LHRLSDP

SEQ ID NO: 36812 - protein, 7 aa, synthetic construct
DLSSQKW

SEQ ID NO: 36813 - protein, 7 aa, synthetic construct
LTRLHTD

SEQ ID NO: 36814 - protein, 7 aa, synthetic construct
MRDGTPA

SEQ ID NO: 36815 - protein, 7 aa, synthetic construct
RSLDVYP

SEQ ID NO: 36816 - protein, 7 aa, synthetic construct
RDEFTAW

SEQ ID NO: 36817 - protein, 7 aa, synthetic construct
YHKKQEN

SEQ ID NO: 36818 - protein, 7 aa, synthetic construct
RGPEIYP

SEQ ID NO: 36819 - protein, 7 aa, synthetic construct
DLTSAKW

SEQ ID NO: 36820 - protein, 7 aa, synthetic construct
LCKPCNT

SEQ ID NO: 36821 - protein, 7 aa, synthetic construct
REDGVSW

SEQ ID NO: 36822 - protein, 7 aa, synthetic construct
RTPVVYP

SEQ ID NO: 36823 - protein, 7 aa, synthetic construct
YFSGVKA

SEQ ID NO: 36824 - protein, 7 aa, synthetic construct
GSEFSTW

SEQ ID NO: 36825 - protein, 7 aa, synthetic construct
LARQSYN

SEQ ID NO: 36826 - protein, 7 aa, synthetic construct
LSRLSPD

SEQ ID NO: 36827 - protein, 7 aa, synthetic construct
DLRSANW

SEQ ID NO: 36828 - protein, 7 aa, synthetic construct
AGGGLYV

SEQ ID NO: 36829 - protein, 7 aa, synthetic construct
YFTGQKE

SEQ ID NO: 36830 - protein, 7 aa, synthetic construct
DMQSSTW

SEQ ID NO: 36831 - protein, 7 aa, synthetic construct
LSRISFN

SEQ ID NO: 36832 - protein, 7 aa, synthetic construct
DLTSRDW

SEQ ID NO: 36833 - protein, 7 aa, synthetic construct
YFAGKKD

SEQ ID NO: 36834 - protein, 7 aa, synthetic construct
LHRLGPN

SEQ ID NO: 36835 - protein, 7 aa, synthetic construct
LMTDRTW

SEQ ID NO: 36836 - protein, 7 aa, synthetic construct
RTDVVYP

SEQ ID NO: 36837 - protein, 7 aa, synthetic construct
DLRSVTW

SEQ ID NO: 36838 - protein, 7 aa, synthetic construct
VAEGLRW

SEQ ID NO: 36839 - protein, 7 aa, synthetic construct
LHRLQDN

SEQ ID NO: 36840 - protein, 7 aa, synthetic construct
YHKLNAN

SEQ ID NO: 36841 - protein, 7 aa, synthetic construct
LSRISTN

SEQ ID NO: 36842 - protein, 7 aa, synthetic construct
KDEFVSY

SEQ ID NO: 36843 - protein, 7 aa, synthetic construct
RDEFVSY

SEQ ID NO: 36844 - protein, 7 aa, synthetic construct
LHRLSVN

SEQ ID NO: 36845 - protein, 7 aa, synthetic construct
VTSSNGI

SEQ ID NO: 36846 - protein, 7 aa, synthetic construct
REEDVYP

SEQ ID NO: 36847 - protein, 7 aa, synthetic construct
TLGCPDR

SEQ ID NO: 36848 - protein, 7 aa, synthetic construct
YARTGPD

SEQ ID NO: 36849 - protein, 7 aa, synthetic construct
IAQVGWD

SEQ ID NO: 36850 - protein, 7 aa, synthetic construct
VATKGIG

SEQ ID NO: 36851 - protein, 7 aa, synthetic construct
LCKPCHT

SEQ ID NO: 36852 - protein, 7 aa, synthetic construct
ITSTNGR

SEQ ID NO: 36853 - protein, 7 aa, synthetic construct
RLESSSW

SEQ ID NO: 36854 - protein, 7 aa, synthetic construct
YFTGVTE

SEQ ID NO: 36855 - protein, 7 aa, synthetic construct
YVKSQPL

SEQ ID NO: 36856 - protein, 7 aa, synthetic construct
YFSGIVA

SEQ ID NO: 36857 - protein, 7 aa, synthetic construct
DMGSSTW

SEQ ID NO: 36858 - protein, 7 aa, synthetic construct
LCKPSLT

SEQ ID NO: 36859 - protein, 7 aa, synthetic construct
YFSKIIA

SEQ ID NO: 36860 - protein, 7 aa, synthetic construct
RSDVVYP

SEQ ID NO: 36861 - protein, 7 aa, synthetic construct
YIKGDYK

SEQ ID NO: 36862 - protein, 7 aa, synthetic construct
PMGSSSW

SEQ ID NO: 36863 - protein, 7 aa, synthetic construct
YFTGHMD

SEQ ID NO: 36864 - protein, 7 aa, synthetic construct
RGEDVYP

SEQ ID NO: 36865 - protein, 7 aa, synthetic construct
MFDGTMA

SEQ ID NO: 36866 - protein, 7 aa, synthetic construct
REETVRW

SEQ ID NO: 36867 - protein, 7 aa, synthetic construct
RTADAYP

SEQ ID NO: 36868 - protein, 7 aa, synthetic construct
LHKLQPD

SEQ ID NO: 36869 - protein, 7 aa, synthetic construct
NMASHTW

SEQ ID NO: 36870 - protein, 7 aa, synthetic construct
RLESAMW

SEQ ID NO: 36871 - protein, 7 aa, synthetic construct
LCRPCSA

SEQ ID NO: 36872 - protein, 7 aa, synthetic construct
YVRSDTG

SEQ ID NO: 36873 - protein, 7 aa, synthetic construct
YFTGVKD

SEQ ID NO: 36874 - protein, 7 aa, synthetic construct
RDEFTGY

SEQ ID NO: 36875 - protein, 7 aa, synthetic construct
YVKSQNG

SEQ ID NO: 36876 - protein, 7 aa, synthetic construct
DLTARNW

SEQ ID NO: 36877 - protein, 7 aa, synthetic construct
IMSSHGW

SEQ ID NO: 36878 - protein, 7 aa, synthetic construct
EMKARTW

SEQ ID NO: 36879 - protein, 7 aa, synthetic construct
YFSGKVE

SEQ ID NO: 36880 - protein, 7 aa, synthetic construct
YVKSQNM

SEQ ID NO: 36881 - protein, 7 aa, synthetic construct
LYDGTSA

SEQ ID NO: 36882 - protein, 7 aa, synthetic construct
IASLGWD

SEQ ID NO: 36883 - protein, 7 aa, synthetic construct
VGTKGWD

SEQ ID NO: 36884 - protein, 7 aa, synthetic construct
YLKSQQT

SEQ ID NO: 36885 - protein, 7 aa, synthetic construct
LSRIGHD

SEQ ID NO: 36886 - protein, 7 aa, synthetic construct
YVKSQPI

SEQ ID NO: 36887 - protein, 7 aa, synthetic construct
REEGVAW

SEQ ID NO: 36888 - protein, 7 aa, synthetic construct
KDDFTMY

SEQ ID NO: 36889 - protein, 7 aa, synthetic construct
HHKLGEN

SEQ ID NO: 36890 - protein, 7 aa, synthetic construct
VMSSQLW

SEQ ID NO: 36891 - protein, 7 aa, synthetic construct
FHKLSPV

SEQ ID NO: 36892 - protein, 7 aa, synthetic construct
VMSTNGR

SEQ ID NO: 36893 - protein, 7 aa, synthetic construct
ALESRTW

SEQ ID NO: 36894 - protein, 7 aa, synthetic construct
LHRAGPD

SEQ ID NO: 36895 - protein, 7 aa, synthetic construct
RMEDAYP

SEQ ID NO: 36896 - protein, 7 aa, synthetic construct
VGHKGWD

SEQ ID NO: 36897 - protein, 7 aa, synthetic construct
VSEFKVY

SEQ ID NO: 36898 - protein, 7 aa, synthetic construct
RGADVYP

SEQ ID NO: 36899 - protein, 7 aa, synthetic construct
LHKLQVD

SEQ ID NO: 36900 - protein, 7 aa, synthetic construct
YFTGHTD

SEQ ID NO: 36901 - protein, 7 aa, synthetic construct
YFTGKLD

SEQ ID NO: 36902 - protein, 7 aa, synthetic construct
EMASRDW

SEQ ID NO: 36903 - protein, 7 aa, synthetic construct
YVKSQQH

SEQ ID NO: 36904 - protein, 7 aa, synthetic construct
YFSKIKE

SEQ ID NO: 36905 - protein, 7 aa, synthetic construct
YFMGKIA

SEQ ID NO: 36906 - protein, 7 aa, synthetic construct
NMASAKW

SEQ ID NO: 36907 - protein, 7 aa, synthetic construct
YFTGKTE

SEQ ID NO: 36908 - protein, 7 aa, synthetic construct
REEMVRW

SEQ ID NO: 36909 - protein, 7 aa, synthetic construct
LSRAAPN

SEQ ID NO: 36910 - protein, 7 aa, synthetic construct
YFTGVME

SEQ ID NO: 36911 - protein, 7 aa, synthetic construct
VSSTNGR

SEQ ID NO: 36912 - protein, 7 aa, synthetic construct
RSEFLAF

SEQ ID NO: 36913 - protein, 7 aa, synthetic construct
VMSDRIW

SEQ ID NO: 36914 - protein, 7 aa, synthetic construct
PMGSAMW

SEQ ID NO: 36915 - protein, 7 aa, synthetic construct
KDDFHVW

SEQ ID NO: 36916 - protein, 7 aa, synthetic construct
KDDFCTF

SEQ ID NO: 36917 - protein, 7 aa, synthetic construct
IPSDRLW

SEQ ID NO: 36918 - protein, 7 aa, synthetic construct
IMTSRDW

SEQ ID NO: 36919 - protein, 7 aa, synthetic construct
REDFVTW

SEQ ID NO: 36920 - protein, 7 aa, synthetic construct
DLRSAAW

SEQ ID NO: 36921 - protein, 7 aa, synthetic construct
YFSGIQE

SEQ ID NO: 36922 - protein, 7 aa, synthetic construct
VASRGWD

SEQ ID NO: 36923 - protein, 7 aa, synthetic construct
YFTGKID

SEQ ID NO: 36924 - protein, 7 aa, synthetic construct
YLKSQIY

SEQ ID NO: 36925 - protein, 7 aa, synthetic construct
RSDFVAF

SEQ ID NO: 36926 - protein, 7 aa, synthetic construct
YFTGMKE

SEQ ID NO: 36927 - protein, 7 aa, synthetic construct
RGTDVFP

SEQ ID NO: 36928 - protein, 7 aa, synthetic construct
YVRSAPG

SEQ ID NO: 36929 - protein, 7 aa, synthetic construct
RLYDAIP

SEQ ID NO: 36930 - protein, 7 aa, synthetic construct
KMADRQW

SEQ ID NO: 36931 - protein, 7 aa, synthetic construct
RDEFHSY

SEQ ID NO: 36932 - protein, 7 aa, synthetic construct
YHKLNHN

SEQ ID NO: 36933 - protein, 7 aa, synthetic construct
LCRPCST

SEQ ID NO: 36934 - protein, 7 aa, synthetic construct
VGLEGRD

SEQ ID NO: 36935 - protein, 7 aa, synthetic construct
YFMGVKE

SEQ ID NO: 36936 - protein, 7 aa, synthetic construct
LCKPCLN

SEQ ID NO: 36937 - protein, 7 aa, synthetic construct
ILSDRNW

SEQ ID NO: 36938 - protein, 7 aa, synthetic construct
ILSSRDW

SEQ ID NO: 36939 - protein, 7 aa, synthetic construct
REDYVHW

SEQ ID NO: 36940 - protein, 7 aa, synthetic construct
RGDTVYP

SEQ ID NO: 36941 - protein, 7 aa, synthetic construct
YHKAGEN

SEQ ID NO: 36942 - protein, 7 aa, synthetic construct
RNDVVYP

SEQ ID NO: 36943 - protein, 7 aa, synthetic construct
YHAKQLN

SEQ ID NO: 36944 - protein, 7 aa, synthetic construct
IMSSSMW

SEQ ID NO: 36945 - protein, 7 aa, synthetic construct
REDGVKW

SEQ ID NO: 36946 - protein, 7 aa, synthetic construct
LCKPCGT

SEQ ID NO: 36947 - protein, 7 aa, synthetic construct
LHRLSMD

SEQ ID NO: 36948 - protein, 7 aa, synthetic construct
TKYGDPA

SEQ ID NO: 36949 - protein, 7 aa, synthetic construct
YFTGVIA

SEQ ID NO: 36950 - protein, 7 aa, synthetic construct
LARNGLN

SEQ ID NO: 36951 - protein, 7 aa, synthetic construct
RMADAFP

SEQ ID NO: 36952 - protein, 7 aa, synthetic construct
YFSGIID

SEQ ID NO: 36953 - protein, 7 aa, synthetic construct
GSEFISF

SEQ ID NO: 36954 - protein, 7 aa, synthetic construct
RMVDVFP

SEQ ID NO: 36955 - protein, 7 aa, synthetic construct
YSKLQPT

SEQ ID NO: 36956 - protein, 7 aa, synthetic construct
LHRLQVD

SEQ ID NO: 36957 - protein, 7 aa, synthetic construct
KDDYTTW

SEQ ID NO: 36958 - protein, 7 aa, synthetic construct
CKEKCRP

SEQ ID NO: 36959 - protein, 7 aa, synthetic construct
DHGKCGR

SEQ ID NO: 36960 - protein, 7 aa, synthetic construct
IMESRKW

SEQ ID NO: 36961 - protein, 7 aa, synthetic construct
YFTGIVD

SEQ ID NO: 36962 - protein, 7 aa, synthetic construct
YSKLDWN

SEQ ID NO: 36963 - protein, 7 aa, synthetic construct
PLQSRDW

SEQ ID NO: 36964 - protein, 7 aa, synthetic construct
RGEFVYP

SEQ ID NO: 36965 - protein, 7 aa, synthetic construct
LSRLNFD

SEQ ID NO: 36966 - protein, 7 aa, synthetic construct
RKQDVFP

SEQ ID NO: 36967 - protein, 7 aa, synthetic construct
KDDFHSY

SEQ ID NO: 36968 - protein, 7 aa, synthetic construct
RMPDAYP

SEQ ID NO: 36969 - protein, 7 aa, synthetic construct
YFTGHTA

SEQ ID NO: 36970 - protein, 7 aa, synthetic construct
PMESQKW

SEQ ID NO: 36971 - protein, 7 aa, synthetic construct
RDEFTSY

SEQ ID NO: 36972 - protein, 7 aa, synthetic construct
LHRLSPV

SEQ ID NO: 36973 - protein, 7 aa, synthetic construct
YWSGVLD

SEQ ID NO: 36974 - protein, 7 aa, synthetic construct
DAIRGWD

SEQ ID NO: 36975 - protein, 7 aa, synthetic construct
LHRLSTN

SEQ ID NO: 36976 - protein, 7 aa, synthetic construct
RTADAFP

SEQ ID NO: 36977 - protein, 7 aa, synthetic construct
RDEFHSF

SEQ ID NO: 36978 - protein, 7 aa, synthetic construct
IASRGWD

SEQ ID NO: 36979 - protein, 7 aa, synthetic construct
YFTGVSL

SEQ ID NO: 36980 - protein, 7 aa, synthetic construct
LHRLSDH

SEQ ID NO: 36981 - protein, 7 aa, synthetic construct
MRDGTSA

SEQ ID NO: 36982 - protein, 7 aa, synthetic construct
RDDFTVY

SEQ ID NO: 36983 - protein, 7 aa, synthetic construct
VSDFMAF

SEQ ID NO: 36984 - protein, 7 aa, synthetic construct
KDDFTGW

SEQ ID NO: 36985 - protein, 7 aa, synthetic construct
LHRLLPV

SEQ ID NO: 36986 - protein, 7 aa, synthetic construct
RMEDAFP

SEQ ID NO: 36987 - protein, 7 aa, synthetic construct
REETVFP

SEQ ID NO: 36988 - protein, 7 aa, synthetic construct
WFSGIKE

SEQ ID NO: 36989 - protein, 7 aa, synthetic construct
RDEHVFP

SEQ ID NO: 36990 - protein, 7 aa, synthetic construct
YLKSQSQ

SEQ ID NO: 36991 - protein, 7 aa, synthetic construct
LSRTSLN

SEQ ID NO: 36992 - protein, 7 aa, synthetic construct
YFTGQTA

SEQ ID NO: 36993 - protein, 7 aa, synthetic construct
YFTGTID

SEQ ID NO: 36994 - protein, 7 aa, synthetic construct
YLKSQTI

SEQ ID NO: 36995 - protein, 7 aa, synthetic construct
YFTGTVA

SEQ ID NO: 36996 - protein, 7 aa, synthetic construct
KDDYSIY

SEQ ID NO: 36997 - protein, 7 aa, synthetic construct
LTRLHQD

SEQ ID NO: 36998 - protein, 7 aa, synthetic construct
MMESSKW

SEQ ID NO: 36999 - protein, 7 aa, synthetic construct
GGEFSAW

SEQ ID NO: 37000 - protein, 7 aa, synthetic construct
LLTSSTW

SEQ ID NO: 37001 - protein, 7 aa, synthetic construct
RMESVMW

SEQ ID NO: 37002 - protein, 7 aa, synthetic construct
MLASSTW

SEQ ID NO: 37003 - protein, 7 aa, synthetic construct
YHKMSPV

SEQ ID NO: 37004 - protein, 7 aa, synthetic construct
DMASKDW

SEQ ID NO: 37005 - protein, 7 aa, synthetic construct
LARTAPD

SEQ ID NO: 37006 - protein, 7 aa, synthetic construct
YWSGILE

SEQ ID NO: 37007 - protein, 7 aa, synthetic construct
KDDYSVF

SEQ ID NO: 37008 - protein, 7 aa, synthetic construct
YSKVGRD

SEQ ID NO: 37009 - protein, 7 aa, synthetic construct
RDGTSAW

SEQ ID NO: 37010 - protein, 7 aa, synthetic construct
KGESRDW

SEQ ID NO: 37011 - protein, 7 aa, synthetic construct
KDEFMSY

SEQ ID NO: 37012 - protein, 7 aa, synthetic construct
YFTGRLE

SEQ ID NO: 37013 - protein, 7 aa, synthetic construct
LYSGEGP

SEQ ID NO: 37014 - protein, 7 aa, synthetic construct
ILSDRIW

SEQ ID NO: 37015 - protein, 7 aa, synthetic construct
NDGTSKW

SEQ ID NO: 37016 - protein, 7 aa, synthetic construct
FCKPCPG

SEQ ID NO: 37017 - protein, 7 aa, synthetic construct
LSRLSPL

SEQ ID NO: 37018 - protein, 7 aa, synthetic construct
VMESRVW

SEQ ID NO: 37019 - protein, 7 aa, synthetic construct
LHRLTAD

SEQ ID NO: 37020 - protein, 7 aa, synthetic construct
YSRLDPV

SEQ ID NO: 37021 - protein, 7 aa, synthetic construct
RGEEVFP

SEQ ID NO: 37022 - protein, 7 aa, synthetic construct
DMSARAW

SEQ ID NO: 37023 - protein, 7 aa, synthetic construct
VMNDAFP

SEQ ID NO: 37024 - protein, 7 aa, synthetic construct
LHRLSPM

SEQ ID NO: 37025 - protein, 7 aa, synthetic construct
YFTGKTD

SEQ ID NO: 37026 - protein, 7 aa, synthetic construct
YTRLDYN

SEQ ID NO: 37027 - protein, 7 aa, synthetic construct
YFSGTKE

SEQ ID NO: 37028 - protein, 7 aa, synthetic construct
YFTGYVD

SEQ ID NO: 37029 - protein, 7 aa, synthetic construct
RSEFVSY

SEQ ID NO: 37030 - protein, 7 aa, synthetic construct
LHRLSQD

SEQ ID NO: 37031 - protein, 7 aa, synthetic construct
LHRLSHD

SEQ ID NO: 37032 - protein, 7 aa, synthetic construct
MCKPCLT

SEQ ID NO: 37033 - protein, 7 aa, synthetic construct
LSRTSYD

SEQ ID NO: 37034 - protein, 7 aa, synthetic construct
YLKSQSD

SEQ ID NO: 37035 - protein, 7 aa, synthetic construct
LARTAYD

SEQ ID NO: 37036 - protein, 7 aa, synthetic construct
IMADRGW

SEQ ID NO: 37037 - protein, 7 aa, synthetic construct
LLSSASW

SEQ ID NO: 37038 - protein, 7 aa, synthetic construct
MLSSSTW

SEQ ID NO: 37039 - protein, 7 aa, synthetic construct
FHKLNEN

SEQ ID NO: 37040 - protein, 7 aa, synthetic construct
YFSGVTE

SEQ ID NO: 37041 - protein, 7 aa, synthetic construct
GGESSSW

SEQ ID NO: 37042 - protein, 7 aa, synthetic construct
WWSGITE

SEQ ID NO: 37043 - protein, 7 aa, synthetic construct
RDENVFP

SEQ ID NO: 37044 - protein, 7 aa, synthetic construct
VATRGWD

SEQ ID NO: 37045 - protein, 7 aa, synthetic construct
KDDYSTY

SEQ ID NO: 37046 - protein, 7 aa, synthetic construct
YLKSQSM

SEQ ID NO: 37047 - protein, 7 aa, synthetic construct
PMSSHGW

SEQ ID NO: 37048 - protein, 7 aa, synthetic construct
EMSSIKW

SEQ ID NO: 37049 - protein, 7 aa, synthetic construct
VMSSQSW

SEQ ID NO: 37050 - protein, 7 aa, synthetic construct
LHRLSIP

SEQ ID NO: 37051 - protein, 7 aa, synthetic construct
RLPTVFP

SEQ ID NO: 37052 - protein, 7 aa, synthetic construct
RLNDVYP

SEQ ID NO: 37053 - protein, 7 aa, synthetic construct
DLQSSTW

SEQ ID NO: 37054 - protein, 7 aa, synthetic construct
FHKKGPD

SEQ ID NO: 37055 - protein, 7 aa, synthetic construct
YVRIGPN

SEQ ID NO: 37056 - protein, 7 aa, synthetic construct
RMTDAYP

SEQ ID NO: 37057 - protein, 7 aa, synthetic construct
LYDGTNA

SEQ ID NO: 37058 - protein, 7 aa, synthetic construct
YWSGIIE

SEQ ID NO: 37059 - protein, 7 aa, synthetic construct
LTRLSPT

SEQ ID NO: 37060 - protein, 7 aa, synthetic construct
RTKEVYP

SEQ ID NO: 37061 - protein, 7 aa, synthetic construct
LSRISNN

SEQ ID NO: 37062 - protein, 7 aa, synthetic construct
LHRLSPN

SEQ ID NO: 37063 - protein, 7 aa, synthetic construct
LSRTSHN

SEQ ID NO: 37064 - protein, 7 aa, synthetic construct
YFTGKHE

SEQ ID NO: 37065 - protein, 7 aa, synthetic construct
PMESLKW

SEQ ID NO: 37066 - protein, 7 aa, synthetic construct
YLKSQAS

SEQ ID NO: 37067 - protein, 7 aa, synthetic construct
REDHVSW

SEQ ID NO: 37068 - protein, 7 aa, synthetic construct
YSRLNDD

SEQ ID NO: 37069 - protein, 7 aa, synthetic construct
RTVTVYP

SEQ ID NO: 37070 - protein, 7 aa, synthetic construct
VNDYVTY

SEQ ID NO: 37071 - protein, 7 aa, synthetic construct
RPNDCKT

SEQ ID NO: 37072 - protein, 7 aa, synthetic construct
TLSSQTW

SEQ ID NO: 37073 - protein, 7 aa, synthetic construct
LMSSAKW

SEQ ID NO: 37074 - protein, 7 aa, synthetic construct
ELQSSKW

SEQ ID NO: 37075 - protein, 7 aa, synthetic construct
LSRVSVN

SEQ ID NO: 37076 - protein, 7 aa, synthetic construct
HSRLGPD

SEQ ID NO: 37077 - protein, 7 aa, synthetic construct
RDEEVYP

SEQ ID NO: 37078 - protein, 7 aa, synthetic construct
YFAGRIA

SEQ ID NO: 37079 - protein, 7 aa, synthetic construct
KDDYTTY

SEQ ID NO: 37080 - protein, 7 aa, synthetic construct
YFTGVIP

SEQ ID NO: 37081 - protein, 7 aa, synthetic construct
LHRLSYD

SEQ ID NO: 37082 - protein, 7 aa, synthetic construct
YLKSQSS

SEQ ID NO: 37083 - protein, 7 aa, synthetic construct
YFTGQLE

SEQ ID NO: 37084 - protein, 7 aa, synthetic construct
DLTSREW

SEQ ID NO: 37085 - protein, 7 aa, synthetic construct
YFSGIQL

SEQ ID NO: 37086 - protein, 7 aa, synthetic construct
KSDFVTY

SEQ ID NO: 37087 - protein, 7 aa, synthetic construct
DLRASTW

SEQ ID NO: 37088 - protein, 7 aa, synthetic construct
REETVYW

SEQ ID NO: 37089 - protein, 7 aa, synthetic construct
YFSGKKE

SEQ ID NO: 37090 - protein, 7 aa, synthetic construct
YFTGITS

SEQ ID NO: 37091 - protein, 7 aa, synthetic construct
YLKSQSN

SEQ ID NO: 37092 - protein, 7 aa, synthetic construct
YFTGKAD

SEQ ID NO: 37093 - protein, 7 aa, synthetic construct
YFTGIQS

SEQ ID NO: 37094 - protein, 7 aa, synthetic construct
LDDYTTW

SEQ ID NO: 37095 - protein, 7 aa, synthetic construct
KDDYTVF

SEQ ID NO: 37096 - protein, 7 aa, synthetic construct
LHRLQLD

SEQ ID NO: 37097 - protein, 7 aa, synthetic construct
RLESANW

SEQ ID NO: 37098 - protein, 7 aa, synthetic construct
YFSGKIE

SEQ ID NO: 37099 - protein, 7 aa, synthetic construct
SDGCSKW

SEQ ID NO: 37100 - protein, 7 aa, synthetic construct
YFSGVKD

SEQ ID NO: 37101 - protein, 7 aa, synthetic construct
YFTGQTE

SEQ ID NO: 37102 - protein, 7 aa, synthetic construct
RTYDSFV

SEQ ID NO: 37103 - protein, 7 aa, synthetic construct
LCRPCGE

SEQ ID NO: 37104 - protein, 7 aa, synthetic construct
YTKLNPN

SEQ ID NO: 37105 - protein, 7 aa, synthetic construct
YFSKIVA

SEQ ID NO: 37106 - protein, 7 aa, synthetic construct
LHRLSED

SEQ ID NO: 37107 - protein, 7 aa, synthetic construct
VWSTNGR

SEQ ID NO: 37108 - protein, 7 aa, synthetic construct
VLSDRNW

SEQ ID NO: 37109 - protein, 7 aa, synthetic construct
RSEFVVY

SEQ ID NO: 37110 - protein, 7 aa, synthetic construct
YHKMMLN

SEQ ID NO: 37111 - protein, 7 aa, synthetic construct
DTYDSYP

SEQ ID NO: 37112 - protein, 7 aa, synthetic construct
YFAGKIA

SEQ ID NO: 37113 - protein, 7 aa, synthetic construct
KGESREW

SEQ ID NO: 37114 - protein, 7 aa, synthetic construct
KLQERTW

SEQ ID NO: 37115 - protein, 7 aa, synthetic construct
RDMEVYP

SEQ ID NO: 37116 - protein, 7 aa, synthetic construct
NDGSSKW

SEQ ID NO: 37117 - protein, 7 aa, synthetic construct
YFTGTVD

SEQ ID NO: 37118 - protein, 7 aa, synthetic construct
LHRLTED

SEQ ID NO: 37119 - protein, 7 aa, synthetic construct
RDDFVKW

SEQ ID NO: 37120 - protein, 7 aa, synthetic construct
RLSSQTW

SEQ ID NO: 37121 - protein, 7 aa, synthetic construct
RSEETYP

SEQ ID NO: 37122 - protein, 7 aa, synthetic construct
RTAQVYP

SEQ ID NO: 37123 - protein, 7 aa, synthetic construct
VKGSCEQ

SEQ ID NO: 37124 - protein, 7 aa, synthetic construct
RMSDAFP

SEQ ID NO: 37125 - protein, 7 aa, synthetic construct
PMGSSQW

SEQ ID NO: 37126 - protein, 7 aa, synthetic construct
YFTGQLD

SEQ ID NO: 37127 - protein, 7 aa, synthetic construct
REEYVTY

SEQ ID NO: 37128 - protein, 7 aa, synthetic construct
RTPTTYP

SEQ ID NO: 37129 - protein, 7 aa, synthetic construct
KDDYSTW

SEQ ID NO: 37130 - protein, 7 aa, synthetic construct
IGIKGWD

SEQ ID NO: 37131 - protein, 7 aa, synthetic construct
YHKLNVV

SEQ ID NO: 37132 - protein, 7 aa, synthetic construct
YTKSDNR

SEQ ID NO: 37133 - protein, 7 aa, synthetic construct
RMSDAYP

SEQ ID NO: 37134 - protein, 7 aa, synthetic construct
LCRPCLE

SEQ ID NO: 37135 - protein, 7 aa, synthetic construct
YFTGHIE

SEQ ID NO: 37136 - protein, 7 aa, synthetic construct
MDDYTMY

SEQ ID NO: 37137 - protein, 7 aa, synthetic construct
DLESRDW

SEQ ID NO: 37138 - protein, 7 aa, synthetic construct
KDEFVSF

SEQ ID NO: 37139 - protein, 7 aa, synthetic construct
DMESRVW

SEQ ID NO: 37140 - protein, 7 aa, synthetic construct
LSRVGRD

SEQ ID NO: 37141 - protein, 7 aa, synthetic construct
DLSSRDW

SEQ ID NO: 37142 - protein, 7 aa, synthetic construct
REDFTSW

SEQ ID NO: 37143 - protein, 7 aa, synthetic construct
ELESRSW

SEQ ID NO: 37144 - protein, 7 aa, synthetic construct
RSESVYP

SEQ ID NO: 37145 - protein, 7 aa, synthetic construct
DPASREW

SEQ ID NO: 37146 - protein, 7 aa, synthetic construct
KEDYLSW

SEQ ID NO: 37147 - protein, 7 aa, synthetic construct
YTRIGPD

SEQ ID NO: 37148 - protein, 7 aa, synthetic construct
DMASNRW

SEQ ID NO: 37149 - protein, 7 aa, synthetic construct
YVKSQQC

SEQ ID NO: 37150 - protein, 7 aa, synthetic construct
RLDDVYP

SEQ ID NO: 37151 - protein, 7 aa, synthetic construct
YFSKVKE

SEQ ID NO: 37152 - protein, 7 aa, synthetic construct
RDEFSPY

SEQ ID NO: 37153 - protein, 7 aa, synthetic construct
VMEARSW

SEQ ID NO: 37154 - protein, 7 aa, synthetic construct
REDGVTW

SEQ ID NO: 37155 - protein, 7 aa, synthetic construct
YVKIAPH

SEQ ID NO: 37156 - protein, 7 aa, synthetic construct
YHAKQIN

SEQ ID NO: 37157 - protein, 7 aa, synthetic construct
RMDDVYP

SEQ ID NO: 37158 - protein, 7 aa, synthetic construct
YLKSQSC

SEQ ID NO: 37159 - protein, 7 aa, synthetic construct
YSKLSTN

SEQ ID NO: 37160 - protein, 7 aa, synthetic construct
MDDYNPF

SEQ ID NO: 37161 - protein, 7 aa, synthetic construct
RLESQSW

SEQ ID NO: 37162 - protein, 7 aa, synthetic construct
YVKSQMS

SEQ ID NO: 37163 - protein, 7 aa, synthetic construct
RTLDAFP

SEQ ID NO: 37164 - protein, 7 aa, synthetic construct
DMASQQW

SEQ ID NO: 37165 - protein, 7 aa, synthetic construct
YFTGKQE

SEQ ID NO: 37166 - protein, 7 aa, synthetic construct
GGETSTW

SEQ ID NO: 37167 - protein, 7 aa, synthetic construct
DLLSRDW

SEQ ID NO: 37168 - protein, 7 aa, synthetic construct
RTFDVFP

SEQ ID NO: 37169 - protein, 7 aa, synthetic construct
YFTGVQA

SEQ ID NO: 37170 - protein, 7 aa, synthetic construct
YVKSDMA

SEQ ID NO: 37171 - protein, 7 aa, synthetic construct
LHRLQVS

SEQ ID NO: 37172 - protein, 7 aa, synthetic construct
LSKASTN

SEQ ID NO: 37173 - protein, 7 aa, synthetic construct
YHAQGPN

SEQ ID NO: 37174 - protein, 7 aa, synthetic construct
LHRLSSN

SEQ ID NO: 37175 - protein, 7 aa, synthetic construct
CAPDYRL

SEQ ID NO: 37176 - protein, 7 aa, synthetic construct
YFTGRVE

SEQ ID NO: 37177 - protein, 7 aa, synthetic construct
EGISRDW

SEQ ID NO: 37178 - protein, 7 aa, synthetic construct
IMSHATW

SEQ ID NO: 37179 - protein, 7 aa, synthetic construct
YVKSQPC

SEQ ID NO: 37180 - protein, 7 aa, synthetic construct
YFSGQVE

SEQ ID NO: 37181 - protein, 7 aa, synthetic construct
RTETTYP

SEQ ID NO: 37182 - protein, 7 aa, synthetic construct
RNESVYP

SEQ ID NO: 37183 - protein, 7 aa, synthetic construct
IMASRDW

SEQ ID NO: 37184 - protein, 7 aa, synthetic construct
RMESAVW

SEQ ID NO: 37185 - protein, 7 aa, synthetic construct
LHKLQVT

SEQ ID NO: 37186 - protein, 7 aa, synthetic construct
LHRLQST

SEQ ID NO: 37187 - protein, 7 aa, synthetic construct
LSRISPN

SEQ ID NO: 37188 - protein, 7 aa, synthetic construct
YVKSQLD

SEQ ID NO: 37189 - protein, 7 aa, synthetic construct
APGSIKW

SEQ ID NO: 37190 - protein, 7 aa, synthetic construct
YFAGRVE

SEQ ID NO: 37191 - protein, 7 aa, synthetic construct
YLKSQNY

SEQ ID NO: 37192 - protein, 7 aa, synthetic construct
YHALNID

SEQ ID NO: 37193 - protein, 7 aa, synthetic construct
YFSGKIA

SEQ ID NO: 37194 - protein, 7 aa, synthetic construct
LHRLSTS

SEQ ID NO: 37195 - protein, 7 aa, synthetic construct
IPRFCAP

SEQ ID NO: 37196 - protein, 7 aa, synthetic construct
KSDFVSY

SEQ ID NO: 37197 - protein, 7 aa, synthetic construct
RDEFSTY

SEQ ID NO: 37198 - protein, 7 aa, synthetic construct
YFTGTFD

SEQ ID NO: 37199 - protein, 7 aa, synthetic construct
DLESREW

SEQ ID NO: 37200 - protein, 7 aa, synthetic construct
RTPDAYP

SEQ ID NO: 37201 - protein, 7 aa, synthetic construct
REEQVRW

SEQ ID NO: 37202 - protein, 7 aa, synthetic construct
GSPGVGW

SEQ ID NO: 37203 - protein, 7 aa, synthetic construct
KDGYSTY

SEQ ID NO: 37204 - protein, 7 aa, synthetic construct
RGDNVYP

SEQ ID NO: 37205 - protein, 7 aa, synthetic construct
YTKSQPC

SEQ ID NO: 37206 - protein, 7 aa, synthetic construct
GGPSSSW

SEQ ID NO: 37207 - protein, 7 aa, synthetic construct
LLSSSNW

SEQ ID NO: 37208 - protein, 7 aa, synthetic construct
LHRLQAD

SEQ ID NO: 37209 - protein, 7 aa, synthetic construct
YLKSQAY

SEQ ID NO: 37210 - protein, 7 aa, synthetic construct
YVKSQKI

SEQ ID NO: 37211 - protein, 7 aa, synthetic construct
LMRDAFP

SEQ ID NO: 37212 - protein, 7 aa, synthetic construct
KSDYLTY

SEQ ID NO: 37213 - protein, 7 aa, synthetic construct
RDDFTSW

SEQ ID NO: 37214 - protein, 7 aa, synthetic construct
LHRLQSD

SEQ ID NO: 37215 - protein, 7 aa, synthetic construct
RNDTVYP

SEQ ID NO: 37216 - protein, 7 aa, synthetic construct
LSRIGRD

SEQ ID NO: 37217 - protein, 7 aa, synthetic construct
RKHDVYP

SEQ ID NO: 37218 - protein, 7 aa, synthetic construct
TDGTSRW

SEQ ID NO: 37219 - protein, 7 aa, synthetic construct
TRSTNGV

SEQ ID NO: 37220 - protein, 7 aa, synthetic construct
YWTGVVE

SEQ ID NO: 37221 - protein, 7 aa, synthetic construct
RMDSVKW

SEQ ID NO: 37222 - protein, 7 aa, synthetic construct
YTKSQQI

SEQ ID NO: 37223 - protein, 7 aa, synthetic construct
RNEDVYP

SEQ ID NO: 37224 - protein, 7 aa, synthetic construct
DLQSREW

SEQ ID NO: 37225 - protein, 7 aa, synthetic construct
YVRSDKL

SEQ ID NO: 37226 - protein, 7 aa, synthetic construct
HDGTSAW

SEQ ID NO: 37227 - protein, 7 aa, synthetic construct
YFTGSWD

SEQ ID NO: 37228 - protein, 7 aa, synthetic construct
REDFVRY

SEQ ID NO: 37229 - protein, 7 aa, synthetic construct
YFSGMKE

SEQ ID NO: 37230 - protein, 7 aa, synthetic construct
SMSSSTW

SEQ ID NO: 37231 - protein, 7 aa, synthetic construct
YFSGIVS

SEQ ID NO: 37232 - protein, 7 aa, synthetic construct
CLSKTGH

SEQ ID NO: 37233 - protein, 7 aa, synthetic construct
TDEFSTW

SEQ ID NO: 37234 - protein, 7 aa, synthetic construct
GSDYVAW

SEQ ID NO: 37235 - protein, 7 aa, synthetic construct
LSRVSPN

SEQ ID NO: 37236 - protein, 7 aa, synthetic construct
LSRASEN

SEQ ID NO: 37237 - protein, 7 aa, synthetic construct
FSRLNPD

SEQ ID NO: 37238 - protein, 7 aa, synthetic construct
RSEFVTF

SEQ ID NO: 37239 - protein, 7 aa, synthetic construct
RTDDAFP

SEQ ID NO: 37240 - protein, 7 aa, synthetic construct
YFTGMVE

SEQ ID NO: 37241 - protein, 7 aa, synthetic construct
YFSGHID

SEQ ID NO: 37242 - protein, 7 aa, synthetic construct
YHAKSLN

SEQ ID NO: 37243 - protein, 7 aa, synthetic construct
VGSTHGV

SEQ ID NO: 37244 - protein, 7 aa, synthetic construct
YWTGIQE

SEQ ID NO: 37245 - protein, 7 aa, synthetic construct
YFAGKVD

SEQ ID NO: 37246 - protein, 7 aa, synthetic construct
YFTGVAK

SEQ ID NO: 37247 - protein, 7 aa, synthetic construct
MHRLSAD

SEQ ID NO: 37248 - protein, 7 aa, synthetic construct
FHRLGPD

SEQ ID NO: 37249 - protein, 7 aa, synthetic construct
RDQTVYP

SEQ ID NO: 37250 - protein, 7 aa, synthetic construct
LCRPCKE

SEQ ID NO: 37251 - protein, 7 aa, synthetic construct
GSEFSRW

SEQ ID NO: 37252 - protein, 7 aa, synthetic construct
LSRISHN

SEQ ID NO: 37253 - protein, 7 aa, synthetic construct
YARTGLD

SEQ ID NO: 37254 - protein, 7 aa, synthetic construct
VESVNGV

SEQ ID NO: 37255 - protein, 7 aa, synthetic construct
YLKSQST

SEQ ID NO: 37256 - protein, 7 aa, synthetic construct
YTKSQSY

SEQ ID NO: 37257 - protein, 7 aa, synthetic construct
YLKSQVY

SEQ ID NO: 37258 - protein, 7 aa, synthetic construct
RLSDVYP

SEQ ID NO: 37259 - protein, 7 aa, synthetic construct
LHRLSDF

SEQ ID NO: 37260 - protein, 7 aa, synthetic construct
PRSTNGV

SEQ ID NO: 37261 - protein, 7 aa, synthetic construct
LSRASTN

SEQ ID NO: 37262 - protein, 7 aa, synthetic construct
VLSTNGR

SEQ ID NO: 37263 - protein, 7 aa, synthetic construct
YLKSQQY

SEQ ID NO: 37264 - protein, 7 aa, synthetic construct
LCRPCME

SEQ ID NO: 37265 - protein, 7 aa, synthetic construct
YFTGVTA

SEQ ID NO: 37266 - protein, 7 aa, synthetic construct
WWSGRIE

SEQ ID NO: 37267 - protein, 7 aa, synthetic construct
YSRVGVD

SEQ ID NO: 37268 - protein, 7 aa, synthetic construct
RESVSTW

SEQ ID NO: 37269 - protein, 7 aa, synthetic construct
LSRASPN

SEQ ID NO: 37270 - protein, 7 aa, synthetic construct
REEFVHW

SEQ ID NO: 37271 - protein, 7 aa, synthetic construct
YVRSDAN

SEQ ID NO: 37272 - protein, 7 aa, synthetic construct
DMTSHKW

SEQ ID NO: 37273 - protein, 7 aa, synthetic construct
IMEARDW

SEQ ID NO: 37274 - protein, 7 aa, synthetic construct
YFAGKIE

SEQ ID NO: 37275 - protein, 7 aa, synthetic construct
RDEFVSW

SEQ ID NO: 37276 - protein, 7 aa, synthetic construct
YFTGFKE

SEQ ID NO: 37277 - protein, 7 aa, synthetic construct
YVRSDKN

SEQ ID NO: 37278 - protein, 7 aa, synthetic construct
DLRSASW

SEQ ID NO: 37279 - protein, 7 aa, synthetic construct
YFTGIID

SEQ ID NO: 37280 - protein, 7 aa, synthetic construct
SDGTSRW

SEQ ID NO: 37281 - protein, 7 aa, synthetic construct
YVRSDLM

SEQ ID NO: 37282 - protein, 7 aa, synthetic construct
ESDFKIY

SEQ ID NO: 37283 - protein, 7 aa, synthetic construct
GGETSRW

SEQ ID NO: 37284 - protein, 7 aa, synthetic construct
RMESANW

SEQ ID NO: 37285 - protein, 7 aa, synthetic construct
RDETSSW

SEQ ID NO: 37286 - protein, 7 aa, synthetic construct
LCKPCYT

SEQ ID NO: 37287 - protein, 7 aa, synthetic construct
LTRAAPN

SEQ ID NO: 37288 - protein, 7 aa, synthetic construct
RDDFSSY

SEQ ID NO: 37289 - protein, 7 aa, synthetic construct
IMHARDW

SEQ ID NO: 37290 - protein, 7 aa, synthetic construct
ILESRGW

SEQ ID NO: 37291 - protein, 7 aa, synthetic construct
YPFPEPA

SEQ ID NO: 37292 - protein, 7 aa, synthetic construct
YFSGTVA

SEQ ID NO: 37293 - protein, 7 aa, synthetic construct
YFTGFRE

SEQ ID NO: 37294 - protein, 7 aa, synthetic construct
KDDYEYF

SEQ ID NO: 37295 - protein, 7 aa, synthetic construct
RDDFTVW

SEQ ID NO: 37296 - protein, 7 aa, synthetic construct
REETVYP

SEQ ID NO: 37297 - protein, 7 aa, synthetic construct
VMESRAW

SEQ ID NO: 37298 - protein, 7 aa, synthetic construct
RPESSRW

SEQ ID NO: 37299 - protein, 7 aa, synthetic construct
WWSGIRE

SEQ ID NO: 37300 - protein, 7 aa, synthetic construct
MHRLSPV

SEQ ID NO: 37301 - protein, 7 aa, synthetic construct
LRDGTNA

SEQ ID NO: 37302 - protein, 7 aa, synthetic construct
RLHDAYP

SEQ ID NO: 37303 - protein, 7 aa, synthetic construct
LCRPCPE

SEQ ID NO: 37304 - protein, 7 aa, synthetic construct
YFTGRTE

SEQ ID NO: 37305 - protein, 7 aa, synthetic construct
CRPPTRD

SEQ ID NO: 37306 - protein, 7 aa, synthetic construct
DMESRKW

SEQ ID NO: 37307 - protein, 7 aa, synthetic construct
VGLKGWD

SEQ ID NO: 37308 - protein, 7 aa, synthetic construct
YWSGIPM

SEQ ID NO: 37309 - protein, 7 aa, synthetic construct
ILSSREW

SEQ ID NO: 37310 - protein, 7 aa, synthetic construct
RDGTSSW

SEQ ID NO: 37311 - protein, 7 aa, synthetic construct
YFAGRIE

SEQ ID NO: 37312 - protein, 7 aa, synthetic construct
RDGVSRW

SEQ ID NO: 37313 - protein, 7 aa, synthetic construct
RTNDVYP

SEQ ID NO: 37314 - protein, 7 aa, synthetic construct
DLQSRSW

SEQ ID NO: 37315 - protein, 7 aa, synthetic construct
LCRPCSS

SEQ ID NO: 37316 - protein, 7 aa, synthetic construct
YFTGHME

SEQ ID NO: 37317 - protein, 7 aa, synthetic construct
CKEDSRI

SEQ ID NO: 37318 - protein, 7 aa, synthetic construct
IMSSRGW

SEQ ID NO: 37319 - protein, 7 aa, synthetic construct
VMSERTW

SEQ ID NO: 37320 - protein, 7 aa, synthetic construct
IAALGWD

SEQ ID NO: 37321 - protein, 7 aa, synthetic construct
RYEPVCP

SEQ ID NO: 37322 - protein, 7 aa, synthetic construct
KDEFRSF

SEQ ID NO: 37323 - protein, 7 aa, synthetic construct
RMESSQW

SEQ ID NO: 37324 - protein, 7 aa, synthetic construct
YSKAQGI

SEQ ID NO: 37325 - protein, 7 aa, synthetic construct
YFTGMHE

SEQ ID NO: 37326 - protein, 7 aa, synthetic construct
TDEFHAY

SEQ ID NO: 37327 - protein, 7 aa, synthetic construct
IESSRTW

SEQ ID NO: 37328 - protein, 7 aa, synthetic construct
RSEFETF

SEQ ID NO: 37329 - protein, 7 aa, synthetic construct
YVKSQNI

SEQ ID NO: 37330 - protein, 7 aa, synthetic construct
QMASRDW

SEQ ID NO: 37331 - protein, 7 aa, synthetic construct
PMADRKW

SEQ ID NO: 37332 - protein, 7 aa, synthetic construct
KDDYVSY

SEQ ID NO: 37333 - protein, 7 aa, synthetic construct
LMSGDGP

SEQ ID NO: 37334 - protein, 7 aa, synthetic construct
KLESSMW

SEQ ID NO: 37335 - protein, 7 aa, synthetic construct
VMSDRVW

SEQ ID NO: 37336 - protein, 7 aa, synthetic construct
REDFTAW

SEQ ID NO: 37337 - protein, 7 aa, synthetic construct
RTYDSIP

SEQ ID NO: 37338 - protein, 7 aa, synthetic construct
RDEYSSY

SEQ ID NO: 37339 - protein, 7 aa, synthetic construct
SMESHGW

SEQ ID NO: 37340 - protein, 7 aa, synthetic construct
NMASRDW

SEQ ID NO: 37341 - protein, 7 aa, synthetic construct
YFSGIHA

SEQ ID NO: 37342 - protein, 7 aa, synthetic construct
YFTGTTE

SEQ ID NO: 37343 - protein, 7 aa, synthetic construct
RMGDAYP

SEQ ID NO: 37344 - protein, 7 aa, synthetic construct
LHRMSID

SEQ ID NO: 37345 - protein, 7 aa, synthetic construct
YHKLDIN

SEQ ID NO: 37346 - protein, 7 aa, synthetic construct
REMTVFP

SEQ ID NO: 37347 - protein, 7 aa, synthetic construct
RNMDVYP

SEQ ID NO: 37348 - protein, 7 aa, synthetic construct
DMMSHKW

SEQ ID NO: 37349 - protein, 7 aa, synthetic construct
SDGVSRW

SEQ ID NO: 37350 - protein, 7 aa, synthetic construct
YHKLQSF

SEQ ID NO: 37351 - protein, 7 aa, synthetic construct
YFSGQKE

SEQ ID NO: 37352 - protein, 7 aa, synthetic construct
VLSDRSW

SEQ ID NO: 37353 - protein, 7 aa, synthetic construct
VMFDAYP

SEQ ID NO: 37354 - protein, 7 aa, synthetic construct
YLKSQEW

SEQ ID NO: 37355 - protein, 7 aa, synthetic construct
PMMSGTW

SEQ ID NO: 37356 - protein, 7 aa, synthetic construct
DLSSSDW

SEQ ID NO: 37357 - protein, 7 aa, synthetic construct
YFTGMRE

SEQ ID NO: 37358 - protein, 7 aa, synthetic construct
KDGTSYW

SEQ ID NO: 37359 - protein, 7 aa, synthetic construct
DMSSNKW

SEQ ID NO: 37360 - protein, 7 aa, synthetic construct
RGEGVYP

SEQ ID NO: 37361 - protein, 7 aa, synthetic construct
YFTGTLE

SEQ ID NO: 37362 - protein, 7 aa, synthetic construct
RTSDAYP

SEQ ID NO: 37363 - protein, 7 aa, synthetic construct
YVKSQQT

SEQ ID NO: 37364 - protein, 7 aa, synthetic construct
DFYGKYA

SEQ ID NO: 37365 - protein, 7 aa, synthetic construct
DMSSKVW

SEQ ID NO: 37366 - protein, 7 aa, synthetic construct
VMADRKW

SEQ ID NO: 37367 - protein, 7 aa, synthetic construct
YFTGKHD

SEQ ID NO: 37368 - protein, 7 aa, synthetic construct
LHRLSEF

SEQ ID NO: 37369 - protein, 7 aa, synthetic construct
FSVCTGS

SEQ ID NO: 37370 - protein, 7 aa, synthetic construct
RSADAYP

SEQ ID NO: 37371 - protein, 7 aa, synthetic construct
PMGSAQW

SEQ ID NO: 37372 - protein, 7 aa, synthetic construct
YLKSQDY

SEQ ID NO: 37373 - protein, 7 aa, synthetic construct
YFSGQIE

SEQ ID NO: 37374 - protein, 7 aa, synthetic construct
YVKSQAS

SEQ ID NO: 37375 - protein, 7 aa, synthetic construct
LHRLSDS

SEQ ID NO: 37376 - protein, 7 aa, synthetic construct
YWSAIKE

SEQ ID NO: 37377 - protein, 7 aa, synthetic construct
YFSGIPS

SEQ ID NO: 37378 - protein, 7 aa, synthetic construct
YSKLSSN

SEQ ID NO: 37379 - protein, 7 aa, synthetic construct
VAMEGRD

SEQ ID NO: 37380 - protein, 7 aa, synthetic construct
DDGSSRW

SEQ ID NO: 37381 - protein, 7 aa, synthetic construct
DMESRTW

SEQ ID NO: 37382 - protein, 7 aa, synthetic construct
FFTGIIE

SEQ ID NO: 37383 - protein, 7 aa, synthetic construct
RDSTVFP

SEQ ID NO: 37384 - protein, 7 aa, synthetic construct
GADHVKW

SEQ ID NO: 37385 - protein, 7 aa, synthetic construct
LHRIGAN

SEQ ID NO: 37386 - protein, 7 aa, synthetic construct
KDDYTLF

SEQ ID NO: 37387 - protein, 7 aa, synthetic construct
YSKLDYN

SEQ ID NO: 37388 - protein, 7 aa, synthetic construct
KCKPCPI

SEQ ID NO: 37389 - protein, 7 aa, synthetic construct
MHRLSPL

SEQ ID NO: 37390 - protein, 7 aa, synthetic construct
DLGSAKW

SEQ ID NO: 37391 - protein, 7 aa, synthetic construct
YYTGVKE

SEQ ID NO: 37392 - protein, 7 aa, synthetic construct
MRDGTPS

SEQ ID NO: 37393 - protein, 7 aa, synthetic construct
DMSSVQW

SEQ ID NO: 37394 - protein, 7 aa, synthetic construct
RDGMSAW

SEQ ID NO: 37395 - protein, 7 aa, synthetic construct
RLESSGW

SEQ ID NO: 37396 - protein, 7 aa, synthetic construct
YFSKVIA

SEQ ID NO: 37397 - protein, 7 aa, synthetic construct
YLKSQSF

SEQ ID NO: 37398 - protein, 7 aa, synthetic construct
GCGTKSG

SEQ ID NO: 37399 - protein, 7 aa, synthetic construct
KSEFKIF

SEQ ID NO: 37400 - protein, 7 aa, synthetic construct
YFSGTID

SEQ ID NO: 37401 - protein, 7 aa, synthetic construct
VMADRIW

SEQ ID NO: 37402 - protein, 7 aa, synthetic construct
RDMDVYP

SEQ ID NO: 37403 - protein, 7 aa, synthetic construct
YFSGRLE

SEQ ID NO: 37404 - protein, 7 aa, synthetic construct
REELVRW

SEQ ID NO: 37405 - protein, 7 aa, synthetic construct
YFTGYID

SEQ ID NO: 37406 - protein, 7 aa, synthetic construct
YFTGTVL

SEQ ID NO: 37407 - protein, 7 aa, synthetic construct
LSKVGYD

SEQ ID NO: 37408 - protein, 7 aa, synthetic construct
YFSGKID

SEQ ID NO: 37409 - protein, 7 aa, synthetic construct
VPDYVRY

SEQ ID NO: 37410 - protein, 7 aa, synthetic construct
RGDDHYP

SEQ ID NO: 37411 - protein, 7 aa, synthetic construct
LCRPCSQ

SEQ ID NO: 37412 - protein, 7 aa, synthetic construct
DMSVRTW

SEQ ID NO: 37413 - protein, 7 aa, synthetic construct
EMGSATW

SEQ ID NO: 37414 - protein, 7 aa, synthetic construct
RMESSMW

SEQ ID NO: 37415 - protein, 7 aa, synthetic construct
YVRSDLG

SEQ ID NO: 37416 - protein, 7 aa, synthetic construct
MKDGTNP

SEQ ID NO: 37417 - protein, 7 aa, synthetic construct
YFTGEVN

SEQ ID NO: 37418 - protein, 7 aa, synthetic construct
RSVSVFP

SEQ ID NO: 37419 - protein, 7 aa, synthetic construct
RNDHVFP

SEQ ID NO: 37420 - protein, 7 aa, synthetic construct
IMADRVW

SEQ ID NO: 37421 - protein, 7 aa, synthetic construct
YWSGVIE

SEQ ID NO: 37422 - protein, 7 aa, synthetic construct
YLKSQSL

SEQ ID NO: 37423 - protein, 7 aa, synthetic construct
RSEFMSY

SEQ ID NO: 37424 - protein, 7 aa, synthetic construct
LHRLSPG

SEQ ID NO: 37425 - protein, 7 aa, synthetic construct
IAGRGWD

SEQ ID NO: 37426 - protein, 7 aa, synthetic construct
IADHVRW

SEQ ID NO: 37427 - protein, 7 aa, synthetic construct
YLRSQSY

SEQ ID NO: 37428 - protein, 7 aa, synthetic construct
DLQSSKW

SEQ ID NO: 37429 - protein, 7 aa, synthetic construct
IMSDRVW

SEQ ID NO: 37430 - protein, 7 aa, synthetic construct
RGEFTYP

SEQ ID NO: 37431 - protein, 7 aa, synthetic construct
REPHVSW

SEQ ID NO: 37432 - protein, 7 aa, synthetic construct
FCKPCLT

SEQ ID NO: 37433 - protein, 7 aa, synthetic construct
CGTKCCP

SEQ ID NO: 37434 - protein, 7 aa, synthetic construct
YFTGIPD

SEQ ID NO: 37435 - protein, 7 aa, synthetic construct
YFSGKME

SEQ ID NO: 37436 - protein, 7 aa, synthetic construct
RSDFKIF

SEQ ID NO: 37437 - protein, 7 aa, synthetic construct
LLSDRTW

SEQ ID NO: 37438 - protein, 7 aa, synthetic construct
ILSARDW

SEQ ID NO: 37439 - protein, 7 aa, synthetic construct
DMESRGW

SEQ ID NO: 37440 - protein, 7 aa, synthetic construct
RNEFTPF

SEQ ID NO: 37441 - protein, 7 aa, synthetic construct
YFTGTMD

SEQ ID NO: 37442 - protein, 7 aa, synthetic construct
YHKASPI

SEQ ID NO: 37443 - protein, 7 aa, synthetic construct
CKPGGHW

SEQ ID NO: 37444 - protein, 7 aa, synthetic construct
ELQSSTW

SEQ ID NO: 37445 - protein, 7 aa, synthetic construct
RGGGLFP

SEQ ID NO: 37446 - protein, 7 aa, synthetic construct
LVDGLRW

SEQ ID NO: 37447 - protein, 7 aa, synthetic construct
YVRSGPN

SEQ ID NO: 37448 - protein, 7 aa, synthetic construct
VHSTNGR

SEQ ID NO: 37449 - protein, 7 aa, synthetic construct
YFTGFVE

SEQ ID NO: 37450 - protein, 7 aa, synthetic construct
YFTGINS

SEQ ID NO: 37451 - protein, 7 aa, synthetic construct
YFTGWPD

SEQ ID NO: 37452 - protein, 7 aa, synthetic construct
LHRLGDH

SEQ ID NO: 37453 - protein, 7 aa, synthetic construct
PMGQATW

SEQ ID NO: 37454 - protein, 7 aa, synthetic construct
RDEFSGY

SEQ ID NO: 37455 - protein, 7 aa, synthetic construct
GSPGVHW

SEQ ID NO: 37456 - protein, 7 aa, synthetic construct
DAFEGRD

SEQ ID NO: 37457 - protein, 7 aa, synthetic construct
KMDSIGW

SEQ ID NO: 37458 - protein, 7 aa, synthetic construct
VMSSRDW

SEQ ID NO: 37459 - protein, 7 aa, synthetic construct
YFTGVLE

SEQ ID NO: 37460 - protein, 7 aa, synthetic construct
QMESRMW

SEQ ID NO: 37461 - protein, 7 aa, synthetic construct
FFSGIKE

SEQ ID NO: 37462 - protein, 7 aa, synthetic construct
YKGSCEQ

SEQ ID NO: 37463 - protein, 7 aa, synthetic construct
IAKRGWD

SEQ ID NO: 37464 - protein, 7 aa, synthetic construct
YTRLDKD

SEQ ID NO: 37465 - protein, 7 aa, synthetic construct
LSRISQN

SEQ ID NO: 37466 - protein, 7 aa, synthetic construct
KDGYSAY

SEQ ID NO: 37467 - protein, 7 aa, synthetic construct
YSRLNVL

SEQ ID NO: 37468 - protein, 7 aa, synthetic construct
RDEFNHW

SEQ ID NO: 37469 - protein, 7 aa, synthetic construct
LTRLVNN

SEQ ID NO: 37470 - protein, 7 aa, synthetic construct
YFTGKLS

SEQ ID NO: 37471 - protein, 7 aa, synthetic construct
YFTGKPD

SEQ ID NO: 37472 - protein, 7 aa, synthetic construct
KDDYHTY

SEQ ID NO: 37473 - protein, 7 aa, synthetic construct
YFTGRTA

SEQ ID NO: 37474 - protein, 7 aa, synthetic construct
YFTGQHA

SEQ ID NO: 37475 - protein, 7 aa, synthetic construct
IMESRAW

SEQ ID NO: 37476 - protein, 7 aa, synthetic construct
RSEFLPF

SEQ ID NO: 37477 - protein, 7 aa, synthetic construct
DMGSSSW

SEQ ID NO: 37478 - protein, 7 aa, synthetic construct
YFTGKCE

SEQ ID NO: 37479 - protein, 7 aa, synthetic construct
LCRPGSE

SEQ ID NO: 37480 - protein, 7 aa, synthetic construct
LHRLVPD

SEQ ID NO: 37481 - protein, 7 aa, synthetic construct
YFTGRAE

SEQ ID NO: 37482 - protein, 7 aa, synthetic construct
YWSGVKE

SEQ ID NO: 37483 - protein, 7 aa, synthetic construct
MHRLGYD

SEQ ID NO: 37484 - protein, 7 aa, synthetic construct
LSRLGYD

SEQ ID NO: 37485 - protein, 7 aa, synthetic construct
CTSKYGH

SEQ ID NO: 37486 - protein, 7 aa, synthetic construct
YVKSDAG

SEQ ID NO: 37487 - protein, 7 aa, synthetic construct
NDGVSKW

SEQ ID NO: 37488 - protein, 7 aa, synthetic construct
YSRVGPD

SEQ ID NO: 37489 - protein, 7 aa, synthetic construct
YHAKQNN

SEQ ID NO: 37490 - protein, 7 aa, synthetic construct
YFSGIPA

SEQ ID NO: 37491 - protein, 7 aa, synthetic construct
SLESRKW

SEQ ID NO: 37492 - protein, 7 aa, synthetic construct
YWAGVKD

SEQ ID NO: 37493 - protein, 7 aa, synthetic construct
DDGVSRW

SEQ ID NO: 37494 - protein, 7 aa, synthetic construct
IMSSAMW

SEQ ID NO: 37495 - protein, 7 aa, synthetic construct
VMRDAYP

SEQ ID NO: 37496 - protein, 7 aa, synthetic construct
YSKLDHN

SEQ ID NO: 37497 - protein, 7 aa, synthetic construct
PMSSSGW

SEQ ID NO: 37498 - protein, 7 aa, synthetic construct
KDEYHTY

SEQ ID NO: 37499 - protein, 7 aa, synthetic construct
VPSSVRW

SEQ ID NO: 37500 - protein, 7 aa, synthetic construct
RVEDAYP

SEQ ID NO: 37501 - protein, 7 aa, synthetic construct
PMGDRKW

SEQ ID NO: 37502 - protein, 7 aa, synthetic construct
VFSTNGR

SEQ ID NO: 37503 - protein, 7 aa, synthetic construct
RDDHVYW

SEQ ID NO: 37504 - protein, 7 aa, synthetic construct
GGTTSCW

SEQ ID NO: 37505 - protein, 7 aa, synthetic construct
YFTGVVD

SEQ ID NO: 37506 - protein, 7 aa, synthetic construct
DLRAHDW

SEQ ID NO: 37507 - protein, 7 aa, synthetic construct
YFSGVMA

SEQ ID NO: 37508 - protein, 7 aa, synthetic construct
ICKPCLT

SEQ ID NO: 37509 - protein, 7 aa, synthetic construct
YFAGVKE

SEQ ID NO: 37510 - protein, 7 aa, synthetic construct
IMMDRGW

SEQ ID NO: 37511 - protein, 7 aa, synthetic construct
RREDVYP

SEQ ID NO: 37512 - protein, 7 aa, synthetic construct
YTRLDPV

SEQ ID NO: 37513 - protein, 7 aa, synthetic construct
GGEFSRW

SEQ ID NO: 37514 - protein, 7 aa, synthetic construct
SLESRSW

SEQ ID NO: 37515 - protein, 7 aa, synthetic construct
YFTGVQS

SEQ ID NO: 37516 - protein, 7 aa, synthetic construct
RNEFTTF

SEQ ID NO: 37517 - protein, 7 aa, synthetic construct
RTHDTFP

SEQ ID NO: 37518 - protein, 7 aa, synthetic construct
RLNDAYP

SEQ ID NO: 37519 - protein, 7 aa, synthetic construct
YHRLQPD

SEQ ID NO: 37520 - protein, 7 aa, synthetic construct
VMQSRDW

SEQ ID NO: 37521 - protein, 7 aa, synthetic construct
LCKPCLV

SEQ ID NO: 37522 - protein, 7 aa, synthetic construct
DMMSRDW

SEQ ID NO: 37523 - protein, 7 aa, synthetic construct
LSRLQEN

SEQ ID NO: 37524 - protein, 7 aa, synthetic construct
IMSDRGW

SEQ ID NO: 37525 - protein, 7 aa, synthetic construct
ELASHAW

SEQ ID NO: 37526 - protein, 7 aa, synthetic construct
YFTGTLA

SEQ ID NO: 37527 - protein, 7 aa, synthetic construct
LHRLQSH

SEQ ID NO: 37528 - protein, 7 aa, synthetic construct
AMADRTW

SEQ ID NO: 37529 - protein, 7 aa, synthetic construct
REESRSW

SEQ ID NO: 37530 - protein, 7 aa, synthetic construct
YLKSQTY

SEQ ID NO: 37531 - protein, 7 aa, synthetic construct
RGEEIYP

SEQ ID NO: 37532 - protein, 7 aa, synthetic construct
HDGTSKW

SEQ ID NO: 37533 - protein, 7 aa, synthetic construct
VESANGV

SEQ ID NO: 37534 - protein, 7 aa, synthetic construct
YFTGKIN

SEQ ID NO: 37535 - protein, 7 aa, synthetic construct
REFDAFP

SEQ ID NO: 37536 - protein, 7 aa, synthetic construct
RDEFTHY

SEQ ID NO: 37537 - protein, 7 aa, synthetic construct
GSEYSKW

SEQ ID NO: 37538 - protein, 7 aa, synthetic construct
WWSGVQS

SEQ ID NO: 37539 - protein, 7 aa, synthetic construct
YFHGKLE

SEQ ID NO: 37540 - protein, 7 aa, synthetic construct
LHRLHPN

SEQ ID NO: 37541 - protein, 7 aa, synthetic construct
RDEYTGF

SEQ ID NO: 37542 - protein, 7 aa, synthetic construct
YSRLGLD

SEQ ID NO: 37543 - protein, 7 aa, synthetic construct
NSEYLPF

SEQ ID NO: 37544 - protein, 7 aa, synthetic construct
YFTGRID

SEQ ID NO: 37545 - protein, 7 aa, synthetic construct
AGGGLFI

SEQ ID NO: 37546 - protein, 7 aa, synthetic construct
VPDHVRW

SEQ ID NO: 37547 - protein, 7 aa, synthetic construct
PLSSASW

SEQ ID NO: 37548 - protein, 7 aa, synthetic construct
YFTGEKE

SEQ ID NO: 37549 - protein, 7 aa, synthetic construct
CKPNNGI

SEQ ID NO: 37550 - protein, 7 aa, synthetic construct
LHKMMMN

SEQ ID NO: 37551 - protein, 7 aa, synthetic construct
LTRPCSE

SEQ ID NO: 37552 - protein, 7 aa, synthetic construct
YVRSDHN

SEQ ID NO: 37553 - protein, 7 aa, synthetic construct
RSEHTYP

SEQ ID NO: 37554 - protein, 7 aa, synthetic construct
YHKSNMN

SEQ ID NO: 37555 - protein, 7 aa, synthetic construct
MPTGDGP

SEQ ID NO: 37556 - protein, 7 aa, synthetic construct
IMSSREW

SEQ ID NO: 37557 - protein, 7 aa, synthetic construct
YFTGKRE

SEQ ID NO: 37558 - protein, 7 aa, synthetic construct
YFHGIHE

SEQ ID NO: 37559 - protein, 7 aa, synthetic construct
VMSSREW

SEQ ID NO: 37560 - protein, 7 aa, synthetic construct
YFTGHTE

SEQ ID NO: 37561 - protein, 7 aa, synthetic construct
DMASTNW

SEQ ID NO: 37562 - protein, 7 aa, synthetic construct
MHRLSTN

SEQ ID NO: 37563 - protein, 7 aa, synthetic construct
IGHEGWD

SEQ ID NO: 37564 - protein, 7 aa, synthetic construct
GCRPDPV

SEQ ID NO: 37565 - protein, 7 aa, synthetic construct
KDDYTSY

SEQ ID NO: 37566 - protein, 7 aa, synthetic construct
YSRLQPD

SEQ ID NO: 37567 - protein, 7 aa, synthetic construct
KDEFKSY

SEQ ID NO: 37568 - protein, 7 aa, synthetic construct
RDEFTSW

SEQ ID NO: 37569 - protein, 7 aa, synthetic construct
YFHGVKE

SEQ ID NO: 37570 - protein, 7 aa, synthetic construct
YTKSQEW

SEQ ID NO: 37571 - protein, 7 aa, synthetic construct
RDEFSSF

SEQ ID NO: 37572 - protein, 7 aa, synthetic construct
VLSSNTW

SEQ ID NO: 37573 - protein, 7 aa, synthetic construct
YVKSDPM

SEQ ID NO: 37574 - protein, 7 aa, synthetic construct
DMTSRDW

SEQ ID NO: 37575 - protein, 7 aa, synthetic construct
YFTGQRE

SEQ ID NO: 37576 - protein, 7 aa, synthetic construct
KDDYLSW

SEQ ID NO: 37577 - protein, 7 aa, synthetic construct
LDEWHGF

SEQ ID NO: 37578 - protein, 7 aa, synthetic construct
RDGVSKW

SEQ ID NO: 37579 - protein, 7 aa, synthetic construct
CAIDYRE

SEQ ID NO: 37580 - protein, 7 aa, synthetic construct
YSRLSPD

SEQ ID NO: 37581 - protein, 7 aa, synthetic construct
AMADRQW

SEQ ID NO: 37582 - protein, 7 aa, synthetic construct
YFTGMMD

SEQ ID NO: 37583 - protein, 7 aa, synthetic construct
YWSGIQE

SEQ ID NO: 37584 - protein, 7 aa, synthetic construct
YHRLSVD

SEQ ID NO: 37585 - protein, 7 aa, synthetic construct
VMGSSNW

SEQ ID NO: 37586 - protein, 7 aa, synthetic construct
LCRPCIE

SEQ ID NO: 37587 - protein, 7 aa, synthetic construct
GSDGVRW

SEQ ID NO: 37588 - protein, 7 aa, synthetic construct
YVRSDVK

SEQ ID NO: 37589 - protein, 7 aa, synthetic construct
RDEFKSW

SEQ ID NO: 37590 - protein, 7 aa, synthetic construct
YWAGVKE

SEQ ID NO: 37591 - protein, 7 aa, synthetic construct
KDDFSGW

SEQ ID NO: 37592 - protein, 7 aa, synthetic construct
MHRLSFD

SEQ ID NO: 37593 - protein, 7 aa, synthetic construct
DLSDRKW

SEQ ID NO: 37594 - protein, 7 aa, synthetic construct
DWIPKCP

SEQ ID NO: 37595 - protein, 7 aa, synthetic construct
RGGDVYP

SEQ ID NO: 37596 - protein, 7 aa, synthetic construct
FFSGVIA

SEQ ID NO: 37597 - protein, 7 aa, synthetic construct
RGELIFP

SEQ ID NO: 37598 - protein, 7 aa, synthetic construct
PMESREW

SEQ ID NO: 37599 - protein, 7 aa, synthetic construct
GEDHVRW

SEQ ID NO: 37600 - protein, 7 aa, synthetic construct
YSRVSPD

SEQ ID NO: 37601 - protein, 7 aa, synthetic construct
YFSGVIS

SEQ ID NO: 37602 - protein, 7 aa, synthetic construct
YWSGLLE

SEQ ID NO: 37603 - protein, 7 aa, synthetic construct
RDDSVFP

SEQ ID NO: 37604 - protein, 7 aa, synthetic construct
REEYTSW

SEQ ID NO: 37605 - protein, 7 aa, synthetic construct
YFSGIHD

SEQ ID NO: 37606 - protein, 7 aa, synthetic construct
VDEYLSW

SEQ ID NO: 37607 - protein, 7 aa, synthetic construct
YFSGKKD

SEQ ID NO: 37608 - protein, 7 aa, synthetic construct
YFTGIHD

SEQ ID NO: 37609 - protein, 7 aa, synthetic construct
YFAGIIA

SEQ ID NO: 37610 - protein, 7 aa, synthetic construct
LMADRTW

SEQ ID NO: 37611 - protein, 7 aa, synthetic construct
RGDHVYP

SEQ ID NO: 37612 - protein, 7 aa, synthetic construct
YFSGIPE

SEQ ID NO: 37613 - protein, 7 aa, synthetic construct
DLRTATW

SEQ ID NO: 37614 - protein, 7 aa, synthetic construct
RTSTVYP

SEQ ID NO: 37615 - protein, 7 aa, synthetic construct
YFSGIQD

SEQ ID NO: 37616 - protein, 7 aa, synthetic construct
SDGTSKW

SEQ ID NO: 37617 - protein, 7 aa, synthetic construct
HSRIGPN

SEQ ID NO: 37618 - protein, 7 aa, synthetic construct
KDDYTGF

SEQ ID NO: 37619 - protein, 7 aa, synthetic construct
VMADRLW

SEQ ID NO: 37620 - protein, 7 aa, synthetic construct
LSRISHD

SEQ ID NO: 37621 - protein, 7 aa, synthetic construct
REEVVRW

SEQ ID NO: 37622 - protein, 7 aa, synthetic construct
RMQDAYP

SEQ ID NO: 37623 - protein, 7 aa, synthetic construct
RMESQSW

SEQ ID NO: 37624 - protein, 7 aa, synthetic construct
MFDGTNP

SEQ ID NO: 37625 - protein, 7 aa, synthetic construct
DGSSRLW

SEQ ID NO: 37626 - protein, 7 aa, synthetic construct
QGEARTW

SEQ ID NO: 37627 - protein, 7 aa, synthetic construct
GCGTKHG

SEQ ID NO: 37628 - protein, 7 aa, synthetic construct
YFTGVID

SEQ ID NO: 37629 - protein, 7 aa, synthetic construct
GCRYGDI

SEQ ID NO: 37630 - protein, 7 aa, synthetic construct
YARTAPD

SEQ ID NO: 37631 - protein, 7 aa, synthetic construct
VNDYISY

SEQ ID NO: 37632 - protein, 7 aa, synthetic construct
PMESSQW

SEQ ID NO: 37633 - protein, 7 aa, synthetic construct
REDYTTW

SEQ ID NO: 37634 - protein, 7 aa, synthetic construct
RTIDSYA

SEQ ID NO: 37635 - protein, 7 aa, synthetic construct
VLTSAKW

SEQ ID NO: 37636 - protein, 7 aa, synthetic construct
KSDYVTY

SEQ ID NO: 37637 - protein, 7 aa, synthetic construct
YFAGKIS

SEQ ID NO: 37638 - protein, 7 aa, synthetic construct
YWTGVTE

SEQ ID NO: 37639 - protein, 7 aa, synthetic construct
YFTGYLD

SEQ ID NO: 37640 - protein, 7 aa, synthetic construct
CGPGCCP

SEQ ID NO: 37641 - protein, 7 aa, synthetic construct
RSEFTTY

SEQ ID NO: 37642 - protein, 7 aa, synthetic construct
RSEFKVF

SEQ ID NO: 37643 - protein, 7 aa, synthetic construct
RDDHVYP

SEQ ID NO: 37644 - protein, 7 aa, synthetic construct
YWAGIKD

SEQ ID NO: 37645 - protein, 7 aa, synthetic construct
YFTGMIE

SEQ ID NO: 37646 - protein, 7 aa, synthetic construct
YFSGVKM

SEQ ID NO: 37647 - protein, 7 aa, synthetic construct
KDDFSPW

SEQ ID NO: 37648 - protein, 7 aa, synthetic construct
YFTGKPN

SEQ ID NO: 37649 - protein, 7 aa, synthetic construct
YSRLNPD

SEQ ID NO: 37650 - protein, 7 aa, synthetic construct
KDEWSVY

SEQ ID NO: 37651 - protein, 7 aa, synthetic construct
YFTGVQL

SEQ ID NO: 37652 - protein, 7 aa, synthetic construct
REDYVKW

SEQ ID NO: 37653 - protein, 7 aa, synthetic construct
YSRLNED

SEQ ID NO: 37654 - protein, 7 aa, synthetic construct
WSTHCCA

SEQ ID NO: 37655 - protein, 7 aa, synthetic construct
YHRLLPD

SEQ ID NO: 37656 - protein, 7 aa, synthetic construct
WWSGIHE

SEQ ID NO: 37657 - protein, 7 aa, synthetic construct
EMESSIW

SEQ ID NO: 37658 - protein, 7 aa, synthetic construct
RSDFEYF

SEQ ID NO: 37659 - protein, 7 aa, synthetic construct
MHRLSVD

SEQ ID NO: 37660 - protein, 7 aa, synthetic construct
SHSTNGR

SEQ ID NO: 37661 - protein, 7 aa, synthetic construct
LHRMSPD

SEQ ID NO: 37662 - protein, 7 aa, synthetic construct
FFTGQVD

SEQ ID NO: 37663 - protein, 7 aa, synthetic construct
YVRSDML

SEQ ID NO: 37664 - protein, 7 aa, synthetic construct
EMESRVW

SEQ ID NO: 37665 - protein, 7 aa, synthetic construct
YWSGVQE

SEQ ID NO: 37666 - protein, 7 aa, synthetic construct
RSEFLSY

SEQ ID NO: 37667 - protein, 7 aa, synthetic construct
VMSQATW

SEQ ID NO: 37668 - protein, 7 aa, synthetic construct
FFTGQIE

SEQ ID NO: 37669 - protein, 7 aa, synthetic construct
QDGTSAW

SEQ ID NO: 37670 - protein, 7 aa, synthetic construct
YHRLQID

SEQ ID NO: 37671 - protein, 7 aa, synthetic construct
YVRSGPS

SEQ ID NO: 37672 - protein, 7 aa, synthetic construct
DLGSSTW

SEQ ID NO: 37673 - protein, 7 aa, synthetic construct
NYAKSLE

SEQ ID NO: 37674 - protein, 7 aa, synthetic construct
KDEFRSY

SEQ ID NO: 37675 - protein, 7 aa, synthetic construct
NMSSSSW

SEQ ID NO: 37676 - protein, 7 aa, synthetic construct
IDGRGWD

SEQ ID NO: 37677 - protein, 7 aa, synthetic construct
REDFVRW

SEQ ID NO: 37678 - protein, 7 aa, synthetic construct
YTRLSPD

SEQ ID NO: 37679 - protein, 7 aa, synthetic construct
DMESHKW

SEQ ID NO: 37680 - protein, 7 aa, synthetic construct
YFSKIRE

SEQ ID NO: 37681 - protein, 7 aa, synthetic construct
KDDYHSY

SEQ ID NO: 37682 - protein, 7 aa, synthetic construct
YLKSQSH

SEQ ID NO: 37683 - protein, 7 aa, synthetic construct
NSTHCCA

SEQ ID NO: 37684 - protein, 7 aa, synthetic construct
LCRPCSD

SEQ ID NO: 37685 - protein, 7 aa, synthetic construct
YFTGVRD

SEQ ID NO: 37686 - protein, 7 aa, synthetic construct
HCKPCLT

SEQ ID NO: 37687 - protein, 7 aa, synthetic construct
YWSGIQD

SEQ ID NO: 37688 - protein, 7 aa, synthetic construct
LARAGYN

SEQ ID NO: 37689 - protein, 7 aa, synthetic construct
YFTGVHQ

SEQ ID NO: 37690 - protein, 7 aa, synthetic construct
YFTGRMD

SEQ ID NO: 37691 - protein, 7 aa, synthetic construct
APDSVRW

SEQ ID NO: 37692 - protein, 7 aa, synthetic construct
YSRLAPD

SEQ ID NO: 37693 - protein, 7 aa, synthetic construct
RDEFTVY

SEQ ID NO: 37694 - protein, 7 aa, synthetic construct
REEEVYP

SEQ ID NO: 37695 - protein, 7 aa, synthetic construct
YFTGVAD

SEQ ID NO: 37696 - protein, 7 aa, synthetic construct
YLKSQMY

SEQ ID NO: 37697 - protein, 7 aa, synthetic construct
LCRPCVE

SEQ ID NO: 37698 - protein, 7 aa, synthetic construct
YFTGHPD

SEQ ID NO: 37699 - protein, 7 aa, synthetic construct
YFTGQIQ

SEQ ID NO: 37700 - protein, 7 aa, synthetic construct
YFSGVIG

SEQ ID NO: 37701 - protein, 7 aa, synthetic construct
YFTGIPE

SEQ ID NO: 37702 - protein, 7 aa, synthetic construct
RLESSAW

SEQ ID NO: 37703 - protein, 7 aa, synthetic construct
RDPTVFP

SEQ ID NO: 37704 - protein, 7 aa, synthetic construct
YVRSGPL

SEQ ID NO: 37705 - protein, 7 aa, synthetic construct
KDEFKVY

SEQ ID NO: 37706 - protein, 7 aa, synthetic construct
YFSGVKQ

SEQ ID NO: 37707 - protein, 7 aa, synthetic construct
RDDFHIY

SEQ ID NO: 37708 - protein, 7 aa, synthetic construct
SGESRLW

SEQ ID NO: 37709 - protein, 7 aa, synthetic construct
YVKSQTW

SEQ ID NO: 37710 - protein, 7 aa, synthetic construct
YFHGKIE

SEQ ID NO: 37711 - protein, 7 aa, synthetic construct
RTFDAFP

SEQ ID NO: 37712 - protein, 7 aa, synthetic construct
IMADRTW

SEQ ID NO: 37713 - protein, 7 aa, synthetic construct
YESTNGK

SEQ ID NO: 37714 - protein, 7 aa, synthetic construct
CAPDYEE

SEQ ID NO: 37715 - protein, 7 aa, synthetic construct
RGEHTYP

SEQ ID NO: 37716 - protein, 7 aa, synthetic construct
VLSDRAW

SEQ ID NO: 37717 - protein, 7 aa, synthetic construct
VMSSRSW

SEQ ID NO: 37718 - protein, 7 aa, synthetic construct
VMSDRLW

SEQ ID NO: 37719 - protein, 7 aa, synthetic construct
KDDFVTW

SEQ ID NO: 37720 - protein, 7 aa, synthetic construct
YFTGQLA

SEQ ID NO: 37721 - protein, 7 aa, synthetic construct
YFSLKVE

SEQ ID NO: 37722 - protein, 7 aa, synthetic construct
YFAGVKS

SEQ ID NO: 37723 - protein, 7 aa, synthetic construct
YTRIGPN

SEQ ID NO: 37724 - protein, 7 aa, synthetic construct
RGEYTFP

SEQ ID NO: 37725 - protein, 7 aa, synthetic construct
LWDGTGP

SEQ ID NO: 37726 - protein, 7 aa, synthetic construct
WLKSQIG

SEQ ID NO: 37727 - protein, 7 aa, synthetic construct
LSRIALN

SEQ ID NO: 37728 - protein, 7 aa, synthetic construct
LSRIAHN

SEQ ID NO: 37729 - protein, 7 aa, synthetic construct
YTRLNDN

SEQ ID NO: 37730 - protein, 7 aa, synthetic construct
LARTGID

SEQ ID NO: 37731 - protein, 7 aa, synthetic construct
YFTGKAN

SEQ ID NO: 37732 - protein, 7 aa, synthetic construct
YARTGPG

SEQ ID NO: 37733 - protein, 7 aa, synthetic construct
YVRSNPG

SEQ ID NO: 37734 - protein, 7 aa, synthetic construct
LCRPCEE

SEQ ID NO: 37735 - protein, 7 aa, synthetic construct
AFECTPG

SEQ ID NO: 37736 - protein, 7 aa, synthetic construct
VMSDRTW

SEQ ID NO: 37737 - protein, 7 aa, synthetic construct
YFTGKQD

SEQ ID NO: 37738 - protein, 7 aa, synthetic construct
DLLSAKW

SEQ ID NO: 37739 - protein, 7 aa, synthetic construct
YFTGVMD

SEQ ID NO: 37740 - protein, 7 aa, synthetic construct
APESVRW

SEQ ID NO: 37741 - protein, 7 aa, synthetic construct
QGESRLW

SEQ ID NO: 37742 - protein, 7 aa, synthetic construct
RNMDAYP

SEQ ID NO: 37743 - protein, 7 aa, synthetic construct
YCKPCLT

SEQ ID NO: 37744 - protein, 7 aa, synthetic construct
KSEFKTY

SEQ ID NO: 37745 - protein, 7 aa, synthetic construct
VESTNGW

SEQ ID NO: 37746 - protein, 7 aa, synthetic construct
RDEFSSW

SEQ ID NO: 37747 - protein, 7 aa, synthetic construct
RTSTHGI

SEQ ID NO: 37748 - protein, 7 aa, synthetic construct
CKGSTEQ

SEQ ID NO: 37749 - protein, 7 aa, synthetic construct
YLKSQSG

SEQ ID NO: 37750 - protein, 7 aa, synthetic construct
LCRPCSN

SEQ ID NO: 37751 - protein, 7 aa, synthetic construct
LCRPCSP

SEQ ID NO: 37752 - protein, 7 aa, synthetic construct
KDSFTAW

SEQ ID NO: 37753 - protein, 7 aa, synthetic construct
QDGTSYW

SEQ ID NO: 37754 - protein, 7 aa, synthetic construct
LHRLSTG

SEQ ID NO: 37755 - protein, 7 aa, synthetic construct
RPEARSW

SEQ ID NO: 37756 - protein, 7 aa, synthetic construct
IRSTNGV

SEQ ID NO: 37757 - protein, 7 aa, synthetic construct
YFSGRKE

SEQ ID NO: 37758 - protein, 7 aa, synthetic construct
DGATSRW

SEQ ID NO: 37759 - protein, 7 aa, synthetic construct
LCRPCLT

SEQ ID NO: 37760 - protein, 7 aa, synthetic construct
YFTGIPA

SEQ ID NO: 37761 - protein, 7 aa, synthetic construct
YWSGVSE

SEQ ID NO: 37762 - protein, 7 aa, synthetic construct
LCRPCNE

SEQ ID NO: 37763 - protein, 7 aa, synthetic construct
MSDFKIF

SEQ ID NO: 37764 - protein, 7 aa, synthetic construct
RSEFATW

SEQ ID NO: 37765 - protein, 7 aa, synthetic construct
LSRISPD

SEQ ID NO: 37766 - protein, 7 aa, synthetic construct
NMADRTW

SEQ ID NO: 37767 - protein, 7 aa, synthetic construct
YFTGIQG

SEQ ID NO: 37768 - protein, 7 aa, synthetic construct
CMPGVPL

SEQ ID NO: 37769 - protein, 7 aa, synthetic construct
YFTGVAQ

SEQ ID NO: 37770 - protein, 7 aa, synthetic construct
RSEFMPY

SEQ ID NO: 37771 - protein, 7 aa, synthetic construct
GGESSTW

SEQ ID NO: 37772 - protein, 7 aa, synthetic construct
LLQSATW

SEQ ID NO: 37773 - protein, 7 aa, synthetic construct
YVKSQAC

SEQ ID NO: 37774 - protein, 7 aa, synthetic construct
WTGTSCL

SEQ ID NO: 37775 - protein, 7 aa, synthetic construct
YFTGMFE

SEQ ID NO: 37776 - protein, 7 aa, synthetic construct
YFTGVKG

SEQ ID NO: 37777 - protein, 7 aa, synthetic construct
RDEFVGY

SEQ ID NO: 37778 - protein, 7 aa, synthetic construct
NMSDRGW

SEQ ID NO: 37779 - protein, 7 aa, synthetic construct
YFSGIIQ

SEQ ID NO: 37780 - protein, 7 aa, synthetic construct
YWTGVVD

SEQ ID NO: 37781 - protein, 7 aa, synthetic construct
RTSTHGV

SEQ ID NO: 37782 - protein, 7 aa, synthetic construct
AGPSRGW

SEQ ID NO: 37783 - protein, 7 aa, synthetic construct
YHAKGPS

SEQ ID NO: 37784 - protein, 7 aa, synthetic construct
LSRIATN

SEQ ID NO: 37785 - protein, 7 aa, synthetic construct
YFSGIPD

SEQ ID NO: 37786 - protein, 7 aa, synthetic construct
FAKSGCG

SEQ ID NO: 37787 - protein, 7 aa, synthetic construct
CKPEAPG

SEQ ID NO: 37788 - protein, 7 aa, synthetic construct
YFHGKIA

SEQ ID NO: 37789 - protein, 7 aa, synthetic construct
CKTTKCC

SEQ ID NO: 37790 - protein, 7 aa, synthetic construct
LCRPCQE

SEQ ID NO: 37791 - protein, 7 aa, synthetic construct
WFSGILE

SEQ ID NO: 37792 - protein, 7 aa, synthetic construct
FFSGIIE

SEQ ID NO: 37793 - protein, 7 aa, synthetic construct
KNDFVTY

SEQ ID NO: 37794 - protein, 7 aa, synthetic construct
YSKLDSN

SEQ ID NO: 37795 - protein, 7 aa, synthetic construct
YFSGKHE

SEQ ID NO: 37796 - protein, 7 aa, synthetic construct
CFDGRSA

SEQ ID NO: 37797 - protein, 7 aa, synthetic construct
LAKTSCN

SEQ ID NO: 37798 - protein, 7 aa, synthetic construct
YFTGYVE

SEQ ID NO: 37799 - protein, 7 aa, synthetic construct
YFTGQIV

SEQ ID NO: 37800 - protein, 7 aa, synthetic construct
RSSDVYP

SEQ ID NO: 37801 - protein, 7 aa, synthetic construct
RMEEVYP

SEQ ID NO: 37802 - protein, 7 aa, synthetic construct
YWSGVTA

SEQ ID NO: 37803 - protein, 7 aa, synthetic construct
YVRSQPG

SEQ ID NO: 37804 - protein, 7 aa, synthetic construct
CTSKNGH

SEQ ID NO: 37805 - protein, 7 aa, synthetic construct
VGGKCPG

SEQ ID NO: 37806 - protein, 7 aa, synthetic construct
RTYDSFP

SEQ ID NO: 37807 - protein, 7 aa, synthetic construct
LHRLSPS

SEQ ID NO: 37808 - protein, 7 aa, synthetic construct
DMTSSSW

SEQ ID NO: 37809 - protein, 7 aa, synthetic construct
YHRLSDD

SEQ ID NO: 37810 - protein, 7 aa, synthetic construct
YSRLQPL

SEQ ID NO: 37811 - protein, 7 aa, synthetic construct
YFSGKQE

SEQ ID NO: 37812 - protein, 7 aa, synthetic construct
MKDGTNA

SEQ ID NO: 37813 - protein, 7 aa, synthetic construct
FFDGTSA

SEQ ID NO: 37814 - protein, 7 aa, synthetic construct
YHKHQTN

SEQ ID NO: 37815 - protein, 7 aa, synthetic construct
GGDYSSW

SEQ ID NO: 37816 - protein, 7 aa, synthetic construct
YFTGIQD

SEQ ID NO: 37817 - protein, 7 aa, synthetic construct
RMESQGW

SEQ ID NO: 37818 - protein, 7 aa, synthetic construct
LCRPCSG

SEQ ID NO: 37819 - protein, 7 aa, synthetic construct
RSVDAYP

SEQ ID NO: 37820 - protein, 7 aa, synthetic construct
YVRSDHG

SEQ ID NO: 37821 - protein, 7 aa, synthetic construct
LCRPCTE

SEQ ID NO: 37822 - protein, 7 aa, synthetic construct
LSRISMN

SEQ ID NO: 37823 - protein, 7 aa, synthetic construct
IMADRAW

SEQ ID NO: 37824 - protein, 7 aa, synthetic construct
YSRVGEN

SEQ ID NO: 37825 - protein, 7 aa, synthetic construct
YFAGVCP

SEQ ID NO: 37826 - protein, 7 aa, synthetic construct
YFAGVRE

SEQ ID NO: 37827 - protein, 7 aa, synthetic construct
REDFVSY

SEQ ID NO: 37828 - protein, 7 aa, synthetic construct
FFTGRVE

SEQ ID NO: 37829 - protein, 7 aa, synthetic construct
LTRISRD

SEQ ID NO: 37830 - protein, 7 aa, synthetic construct
LHRLSTH

SEQ ID NO: 37831 - protein, 7 aa, synthetic construct
YSRLQDN

SEQ ID NO: 37832 - protein, 7 aa, synthetic construct
FFTGKIA

SEQ ID NO: 37833 - protein, 7 aa, synthetic construct
KGDSRSW

SEQ ID NO: 37834 - protein, 7 aa, synthetic construct
YYTGKKE

SEQ ID NO: 37835 - protein, 7 aa, synthetic construct
YFSGQME

SEQ ID NO: 37836 - protein, 7 aa, synthetic construct
YFSGMVA

SEQ ID NO: 37837 - protein, 7 aa, synthetic construct
YFSGVSQ

SEQ ID NO: 37838 - protein, 7 aa, synthetic construct
RDGTSHW

SEQ ID NO: 37839 - protein, 7 aa, synthetic construct
PYAKSRD

SEQ ID NO: 37840 - protein, 7 aa, synthetic construct
YHAKGVN

SEQ ID NO: 37841 - protein, 7 aa, synthetic construct
YFSGEKE

SEQ ID NO: 37842 - protein, 7 aa, synthetic construct
ELESREW

SEQ ID NO: 37843 - protein, 7 aa, synthetic construct
RDEFCTR

SEQ ID NO: 37844 - protein, 7 aa, synthetic construct
KSEYSTY

SEQ ID NO: 37845 - protein, 7 aa, synthetic construct
YWTGTVA

SEQ ID NO: 37846 - protein, 7 aa, synthetic construct
RDGASSW

SEQ ID NO: 37847 - protein, 7 aa, synthetic construct
RGDEVYP

SEQ ID NO: 37848 - protein, 7 aa, synthetic construct
NDGNSKW

SEQ ID NO: 37849 - protein, 7 aa, synthetic construct
YFSGKIM

SEQ ID NO: 37850 - protein, 7 aa, synthetic construct
RDGSSAW

SEQ ID NO: 37851 - protein, 7 aa, synthetic construct
YVKGDTR

SEQ ID NO: 37852 - protein, 7 aa, synthetic construct
RVMDAYA

SEQ ID NO: 37853 - protein, 7 aa, synthetic construct
YFSGTIN

SEQ ID NO: 37854 - protein, 7 aa, synthetic construct
YVRSDTK

SEQ ID NO: 37855 - protein, 7 aa, synthetic construct
YFTGQMD

SEQ ID NO: 37856 - protein, 7 aa, synthetic construct
YFSGVVR

SEQ ID NO: 37857 - protein, 7 aa, synthetic construct
REEFTAW

SEQ ID NO: 37858 - protein, 7 aa, synthetic construct
GGIGSNW

SEQ ID NO: 37859 - protein, 7 aa, synthetic construct
YSKLDSR

SEQ ID NO: 37860 - protein, 7 aa, synthetic construct
WWSGMVE

SEQ ID NO: 37861 - protein, 7 aa, synthetic construct
LSRLNMD

SEQ ID NO: 37862 - protein, 7 aa, synthetic construct
FHRLSPD

SEQ ID NO: 37863 - protein, 7 aa, synthetic construct
YSRLNLD

SEQ ID NO: 37864 - protein, 7 aa, synthetic construct
FFTGVRE

SEQ ID NO: 37865 - protein, 7 aa, synthetic construct
YFTGQTD

SEQ ID NO: 37866 - protein, 7 aa, synthetic construct
YLKSQHY

SEQ ID NO: 37867 - protein, 7 aa, synthetic construct
VMESTRW

SEQ ID NO: 37868 - protein, 7 aa, synthetic construct
YFSGTKL

SEQ ID NO: 37869 - protein, 7 aa, synthetic construct
GGETSHW

SEQ ID NO: 37870 - protein, 7 aa, synthetic construct
RESEVRW

SEQ ID NO: 37871 - protein, 7 aa, synthetic construct
RLEDRLW

SEQ ID NO: 37872 - protein, 7 aa, synthetic construct
YFAGKVA

SEQ ID NO: 37873 - protein, 7 aa, synthetic construct
YFSGQTA

SEQ ID NO: 37874 - protein, 7 aa, synthetic construct
VGHRGWD

SEQ ID NO: 37875 - protein, 7 aa, synthetic construct
FHRLSID

SEQ ID NO: 37876 - protein, 7 aa, synthetic construct
YWSGVKD

SEQ ID NO: 37877 - protein, 7 aa, synthetic construct
CKPDAIR

SEQ ID NO: 37878 - protein, 7 aa, synthetic construct
VNDFVTY

SEQ ID NO: 37879 - protein, 7 aa, synthetic construct
IMSGRTW

SEQ ID NO: 37880 - protein, 7 aa, synthetic construct
YWTGVSE

SEQ ID NO: 37881 - protein, 7 aa, synthetic construct
YFSGKVS

SEQ ID NO: 37882 - protein, 7 aa, synthetic construct
YHRLSIH

SEQ ID NO: 37883 - protein, 7 aa, synthetic construct
FFSGVLE

SEQ ID NO: 37884 - protein, 7 aa, synthetic construct
INSTNGR

SEQ ID NO: 37885 - protein, 7 aa, synthetic construct
YVRSDVG

SEQ ID NO: 37886 - protein, 7 aa, synthetic construct
EKKFNPF

SEQ ID NO: 37887 - protein, 7 aa, synthetic construct
YFTGHHD

SEQ ID NO: 37888 - protein, 7 aa, synthetic construct
YFTGMIS

SEQ ID NO: 37889 - protein, 7 aa, synthetic construct
YHKSGDN

SEQ ID NO: 37890 - protein, 7 aa, synthetic construct
YYTGRVE

SEQ ID NO: 37891 - protein, 7 aa, synthetic construct
CAPDYRS

SEQ ID NO: 37892 - protein, 7 aa, synthetic construct
VMSDRHW

SEQ ID NO: 37893 - protein, 7 aa, synthetic construct
YHAKGEN

SEQ ID NO: 37894 - protein, 7 aa, synthetic construct
YYTGIIA

SEQ ID NO: 37895 - protein, 7 aa, synthetic construct
YHRLSIP

SEQ ID NO: 37896 - protein, 7 aa, synthetic construct
KDDYSAY

SEQ ID NO: 37897 - protein, 7 aa, synthetic construct
KDDFLSW

SEQ ID NO: 37898 - protein, 7 aa, synthetic construct
KDGFSHY

SEQ ID NO: 37899 - protein, 7 aa, synthetic construct
YWSGIQL

SEQ ID NO: 37900 - protein, 7 aa, synthetic construct
RMEDRIW

SEQ ID NO: 37901 - protein, 7 aa, synthetic construct
YFSGVID

SEQ ID NO: 37902 - protein, 7 aa, synthetic construct
GGEYSKW

SEQ ID NO: 37903 - protein, 7 aa, synthetic construct
GAEHVRW

SEQ ID NO: 37904 - protein, 7 aa, synthetic construct
LHRVGQN

SEQ ID NO: 37905 - protein, 7 aa, synthetic construct
NSLEGRN

SEQ ID NO: 37906 - protein, 7 aa, synthetic construct
YWSGVVA

SEQ ID NO: 37907 - protein, 7 aa, synthetic construct
VPESVRW

SEQ ID NO: 37908 - protein, 7 aa, synthetic construct
RDVSVFP

SEQ ID NO: 37909 - protein, 7 aa, synthetic construct
YFTGQSD

SEQ ID NO: 37910 - protein, 7 aa, synthetic construct
YSRVGGG

SEQ ID NO: 37911 - protein, 7 aa, synthetic construct
LARIGWD

SEQ ID NO: 37912 - protein, 7 aa, synthetic construct
RTHDVYP

SEQ ID NO: 37913 - protein, 7 aa, synthetic construct
CKPLERP

SEQ ID NO: 37914 - protein, 7 aa, synthetic construct
RDGFSSY

SEQ ID NO: 37915 - protein, 7 aa, synthetic construct
LSRVSVD

SEQ ID NO: 37916 - protein, 7 aa, synthetic construct
YFTGIHV

SEQ ID NO: 37917 - protein, 7 aa, synthetic construct
YFAGKRE

SEQ ID NO: 37918 - protein, 7 aa, synthetic construct
CTSLTGH

SEQ ID NO: 37919 - protein, 7 aa, synthetic construct
YFTGFME

SEQ ID NO: 37920 - protein, 7 aa, synthetic construct
RDEFVSF

SEQ ID NO: 37921 - protein, 7 aa, synthetic construct
WVKSDTH

SEQ ID NO: 37922 - protein, 7 aa, synthetic construct
YFTGKNE

SEQ ID NO: 37923 - protein, 7 aa, synthetic construct
YSKVGHD

SEQ ID NO: 37924 - protein, 7 aa, synthetic construct
GSPGVRW

SEQ ID NO: 37925 - protein, 7 aa, synthetic construct
REDHVFW

SEQ ID NO: 37926 - protein, 7 aa, synthetic construct
YFSGVIP

SEQ ID NO: 37927 - protein, 7 aa, synthetic construct
QDGTSKW

SEQ ID NO: 37928 - protein, 7 aa, synthetic construct
LARGGYD

SEQ ID NO: 37929 - protein, 7 aa, synthetic construct
RDGTSMW

SEQ ID NO: 37930 - protein, 7 aa, synthetic construct
YWSGIKD

SEQ ID NO: 37931 - protein, 7 aa, synthetic construct
GGDGVRW

SEQ ID NO: 37932 - protein, 7 aa, synthetic construct
RENTVYW

SEQ ID NO: 37933 - protein, 7 aa, synthetic construct
VMSDRAW

SEQ ID NO: 37934 - protein, 7 aa, synthetic construct
RMESVSW

SEQ ID NO: 37935 - protein, 7 aa, synthetic construct
YVRSQTD

SEQ ID NO: 37936 - protein, 7 aa, synthetic construct
FFTGKID

SEQ ID NO: 37937 - protein, 7 aa, synthetic construct
INGRGWD

SEQ ID NO: 37938 - protein, 7 aa, synthetic construct
RTYDSYP

SEQ ID NO: 37939 - protein, 7 aa, synthetic construct
RNEFTTY

SEQ ID NO: 37940 - protein, 7 aa, synthetic construct
EMTSHMW

SEQ ID NO: 37941 - protein, 7 aa, synthetic construct
REYDAFP

SEQ ID NO: 37942 - protein, 7 aa, synthetic construct
RDEFKSY

SEQ ID NO: 37943 - protein, 7 aa, synthetic construct
YFSGTVS

SEQ ID NO: 37944 - protein, 7 aa, synthetic construct
RSEFLPY

SEQ ID NO: 37945 - protein, 7 aa, synthetic construct
YFTGRHE

SEQ ID NO: 37946 - protein, 7 aa, synthetic construct
TDPCKPP

SEQ ID NO: 37947 - protein, 7 aa, synthetic construct
YSRVSDP

SEQ ID NO: 37948 - protein, 7 aa, synthetic construct
YFSGVQQ

SEQ ID NO: 37949 - protein, 7 aa, synthetic construct
TRDGCMA

SEQ ID NO: 37950 - protein, 7 aa, synthetic construct
KDDFVSF

SEQ ID NO: 37951 - protein, 7 aa, synthetic construct
KDDFTGF

SEQ ID NO: 37952 - protein, 7 aa, synthetic construct
YFSGVQS

SEQ ID NO: 37953 - protein, 7 aa, synthetic construct
QMAAHDW

SEQ ID NO: 37954 - protein, 7 aa, synthetic construct
CAPDYHE

SEQ ID NO: 37955 - protein, 7 aa, synthetic construct
YFHGIQE

SEQ ID NO: 37956 - protein, 7 aa, synthetic construct
ILADRNW

SEQ ID NO: 37957 - protein, 7 aa, synthetic construct
LCKPCLA

SEQ ID NO: 37958 - protein, 7 aa, synthetic construct
YSRIEPN

SEQ ID NO: 37959 - protein, 7 aa, synthetic construct
RDGSSLW

SEQ ID NO: 37960 - protein, 7 aa, synthetic construct
GEDYVRW

SEQ ID NO: 37961 - protein, 7 aa, synthetic construct
YHANLPN

SEQ ID NO: 37962 - protein, 7 aa, synthetic construct
YFTGHPN

SEQ ID NO: 37963 - protein, 7 aa, synthetic construct
RGMDVYP

SEQ ID NO: 37964 - protein, 7 aa, synthetic construct
VMEFNAF

SEQ ID NO: 37965 - protein, 7 aa, synthetic construct
GSEFVRW

SEQ ID NO: 37966 - protein, 7 aa, synthetic construct
RMESRDW

SEQ ID NO: 37967 - protein, 7 aa, synthetic construct
RLEAVTW

SEQ ID NO: 37968 - protein, 7 aa, synthetic construct
TEYMCRP

SEQ ID NO: 37969 - protein, 7 aa, synthetic construct
RTNTVYP

SEQ ID NO: 37970 - protein, 7 aa, synthetic construct
YSRIGEN

SEQ ID NO: 37971 - protein, 7 aa, synthetic construct
YFHGKVE

SEQ ID NO: 37972 - protein, 7 aa, synthetic construct
YFSGVMS

SEQ ID NO: 37973 - protein, 7 aa, synthetic construct
YFSGTKD

SEQ ID NO: 37974 - protein, 7 aa, synthetic construct
RMEDRNW

SEQ ID NO: 37975 - protein, 7 aa, synthetic construct
YWSAIPA

SEQ ID NO: 37976 - protein, 7 aa, synthetic construct
CKPDSRV

SEQ ID NO: 37977 - protein, 7 aa, synthetic construct
KDQYTMF

SEQ ID NO: 37978 - protein, 7 aa, synthetic construct
IADHLRW

SEQ ID NO: 37979 - protein, 7 aa, synthetic construct
YYSGIVA

SEQ ID NO: 37980 - protein, 7 aa, synthetic construct
YWSGIHE

SEQ ID NO: 37981 - protein, 7 aa, synthetic construct
SMESHQW

SEQ ID NO: 37982 - protein, 7 aa, synthetic construct
YVRSQIG

SEQ ID NO: 37983 - protein, 7 aa, synthetic construct
VLESRDW

SEQ ID NO: 37984 - protein, 7 aa, synthetic construct
FHRLSVD

SEQ ID NO: 37985 - protein, 7 aa, synthetic construct
TSEYKYY

SEQ ID NO: 37986 - protein, 7 aa, synthetic construct
YFTGMVQ

SEQ ID NO: 37987 - protein, 7 aa, synthetic construct
YAKTAYN

SEQ ID NO: 37988 - protein, 7 aa, synthetic construct
YFTGKLV

SEQ ID NO: 37989 - protein, 7 aa, synthetic construct
GDGTSRW

SEQ ID NO: 37990 - protein, 7 aa, synthetic construct
KDDYSHY

SEQ ID NO: 37991 - protein, 7 aa, synthetic construct
LCKPCFT

SEQ ID NO: 37992 - protein, 7 aa, synthetic construct
TSTHCCA

SEQ ID NO: 37993 - protein, 7 aa, synthetic construct
YVKSQSY

SEQ ID NO: 37994 - protein, 7 aa, synthetic construct
REGTSKW

SEQ ID NO: 37995 - protein, 7 aa, synthetic construct
YWSGIAD

SEQ ID NO: 37996 - protein, 7 aa, synthetic construct
FWTGVKE

SEQ ID NO: 37997 - protein, 7 aa, synthetic construct
RRTDVYP

SEQ ID NO: 37998 - protein, 7 aa, synthetic construct
VLQSATW

SEQ ID NO: 37999 - protein, 7 aa, synthetic construct
RSMDSYP

SEQ ID NO: 38000 - protein, 7 aa, synthetic construct
YSRVGTG

SEQ ID NO: 38001 - protein, 7 aa, synthetic construct
VARLGWD

SEQ ID NO: 38002 - protein, 7 aa, synthetic construct
REDMVKW

SEQ ID NO: 38003 - protein, 7 aa, synthetic construct
YMKDAYP

SEQ ID NO: 38004 - protein, 7 aa, synthetic construct
MMDGTSA

SEQ ID NO: 38005 - protein, 7 aa, synthetic construct
YSRLGVG

SEQ ID NO: 38006 - protein, 7 aa, synthetic construct
YSRLQFD

SEQ ID NO: 38007 - protein, 7 aa, synthetic construct
KCIEDCC

SEQ ID NO: 38008 - protein, 7 aa, synthetic construct
QDGNSRW

SEQ ID NO: 38009 - protein, 7 aa, synthetic construct
CKPGTGL

SEQ ID NO: 38010 - protein, 7 aa, synthetic construct
YYTGKID

SEQ ID NO: 38011 - protein, 7 aa, synthetic construct
RDEFTRW

SEQ ID NO: 38012 - protein, 7 aa, synthetic construct
RSEFKTY

SEQ ID NO: 38013 - protein, 7 aa, synthetic construct
YWTGVPE

SEQ ID NO: 38014 - protein, 7 aa, synthetic construct
IMAERTW

SEQ ID NO: 38015 - protein, 7 aa, synthetic construct
YSRLSPI

SEQ ID NO: 38016 - protein, 7 aa, synthetic construct
GGAGSCW

SEQ ID NO: 38017 - protein, 7 aa, synthetic construct
GENVVRW

SEQ ID NO: 38018 - protein, 7 aa, synthetic construct
GSATSSW

SEQ ID NO: 38019 - protein, 7 aa, synthetic construct
RSDHVYP

SEQ ID NO: 38020 - protein, 7 aa, synthetic construct
YFSGIPQ

SEQ ID NO: 38021 - protein, 7 aa, synthetic construct
GPDHVRW

SEQ ID NO: 38022 - protein, 7 aa, synthetic construct
YDGSCKA

SEQ ID NO: 38023 - protein, 7 aa, synthetic construct
YWTGKIE

SEQ ID NO: 38024 - protein, 7 aa, synthetic construct
RLESTSW

SEQ ID NO: 38025 - protein, 7 aa, synthetic construct
RLEDRKW

SEQ ID NO: 38026 - protein, 7 aa, synthetic construct
LHRLSAG

SEQ ID NO: 38027 - protein, 7 aa, synthetic construct
CMKSREI

SEQ ID NO: 38028 - protein, 7 aa, synthetic construct
CGKIKPG

SEQ ID NO: 38029 - protein, 7 aa, synthetic construct
REEAVSW

SEQ ID NO: 38030 - protein, 7 aa, synthetic construct
YHRLSPE

SEQ ID NO: 38031 - protein, 7 aa, synthetic construct
YFSGKTD

SEQ ID NO: 38032 - protein, 7 aa, synthetic construct
YWTGVID

SEQ ID NO: 38033 - protein, 7 aa, synthetic construct
RKDDVFP

SEQ ID NO: 38034 - protein, 7 aa, synthetic construct
RMESIKW

SEQ ID NO: 38035 - protein, 7 aa, synthetic construct
RDFDVYP

SEQ ID NO: 38036 - protein, 7 aa, synthetic construct
YWTGMIE

SEQ ID NO: 38037 - protein, 7 aa, synthetic construct
PYARSVE

SEQ ID NO: 38038 - protein, 7 aa, synthetic construct
WWSGVGA

SEQ ID NO: 38039 - protein, 7 aa, synthetic construct
DLRDRGW

SEQ ID NO: 38040 - protein, 7 aa, synthetic construct
YFSGQKD

SEQ ID NO: 38041 - protein, 7 aa, synthetic construct
RPDSVRW

SEQ ID NO: 38042 - protein, 7 aa, synthetic construct
REDYVKY

SEQ ID NO: 38043 - protein, 7 aa, synthetic construct
IDDYVHW

SEQ ID NO: 38044 - protein, 7 aa, synthetic construct
NGPGCPW

SEQ ID NO: 38045 - protein, 7 aa, synthetic construct
RDDFVSF

SEQ ID NO: 38046 - protein, 7 aa, synthetic construct
FHRLSPN

SEQ ID NO: 38047 - protein, 7 aa, synthetic construct
VPSPCDG

SEQ ID NO: 38048 - protein, 7 aa, synthetic construct
RAVDAYP

SEQ ID NO: 38049 - protein, 7 aa, synthetic construct
WRTGTCA

SEQ ID NO: 38050 - protein, 7 aa, synthetic construct
YFSGKAE

SEQ ID NO: 38051 - protein, 7 aa, synthetic construct
PYARSEM

SEQ ID NO: 38052 - protein, 7 aa, synthetic construct
VPDWVEF

SEQ ID NO: 38053 - protein, 7 aa, synthetic construct
LCRPCHE

SEQ ID NO: 38054 - protein, 7 aa, synthetic construct
YFSGVSE

SEQ ID NO: 38055 - protein, 7 aa, synthetic construct
CDGPCCP

SEQ ID NO: 38056 - protein, 7 aa, synthetic construct
YFSGQLE

SEQ ID NO: 38057 - protein, 7 aa, synthetic construct
RDISVFP

SEQ ID NO: 38058 - protein, 7 aa, synthetic construct
SRSTNGI

SEQ ID NO: 38059 - protein, 7 aa, synthetic construct
REDFVKY

SEQ ID NO: 38060 - protein, 7 aa, synthetic construct
YFTGKTN

SEQ ID NO: 38061 - protein, 7 aa, synthetic construct
YSRLNMD

SEQ ID NO: 38062 - protein, 7 aa, synthetic construct
LHRLHVD

SEQ ID NO: 38063 - protein, 7 aa, synthetic construct
LTRLQSN

SEQ ID NO: 38064 - protein, 7 aa, synthetic construct
DMQSRDW

SEQ ID NO: 38065 - protein, 7 aa, synthetic construct
QEDYVTW

SEQ ID NO: 38066 - protein, 7 aa, synthetic construct
YVRSDMH

SEQ ID NO: 38067 - protein, 7 aa, synthetic construct
YFTGRPD

SEQ ID NO: 38068 - protein, 7 aa, synthetic construct
LHRLSEH

SEQ ID NO: 38069 - protein, 7 aa, synthetic construct
YTRLDPM

SEQ ID NO: 38070 - protein, 7 aa, synthetic construct
WWTGVCE

SEQ ID NO: 38071 - protein, 7 aa, synthetic construct
NDGISKW

SEQ ID NO: 38072 - protein, 7 aa, synthetic construct
RDMDAYP

SEQ ID NO: 38073 - protein, 7 aa, synthetic construct
RSDFKIY

SEQ ID NO: 38074 - protein, 7 aa, synthetic construct
YFAGKHD

SEQ ID NO: 38075 - protein, 7 aa, synthetic construct
CAPVCCE

SEQ ID NO: 38076 - protein, 7 aa, synthetic construct
YTRLDPH

SEQ ID NO: 38077 - protein, 7 aa, synthetic construct
VPEHCKD

SEQ ID NO: 38078 - protein, 7 aa, synthetic construct
YFSGVMD

SEQ ID NO: 38079 - protein, 7 aa, synthetic construct
YDSTNGL

SEQ ID NO: 38080 - protein, 7 aa, synthetic construct
YFHGKVA

SEQ ID NO: 38081 - protein, 7 aa, synthetic construct
RLEDRSW

SEQ ID NO: 38082 - protein, 7 aa, synthetic construct
MRNTHCD

SEQ ID NO: 38083 - protein, 7 aa, synthetic construct
NTYDSYP

SEQ ID NO: 38084 - protein, 7 aa, synthetic construct
YSRIQPD

SEQ ID NO: 38085 - protein, 7 aa, synthetic construct
CRGEQKM

SEQ ID NO: 38086 - protein, 7 aa, synthetic construct
YSRLQND

SEQ ID NO: 38087 - protein, 7 aa, synthetic construct
LCRPCSI

SEQ ID NO: 38088 - protein, 7 aa, synthetic construct
YLKSQSW

SEQ ID NO: 38089 - protein, 7 aa, synthetic construct
VPLKGWD

SEQ ID NO: 38090 - protein, 7 aa, synthetic construct
YHRLGED

SEQ ID NO: 38091 - protein, 7 aa, synthetic construct
LHANGPN

SEQ ID NO: 38092 - protein, 7 aa, synthetic construct
GDGYSKW

SEQ ID NO: 38093 - protein, 7 aa, synthetic construct
YFTGVPS

SEQ ID NO: 38094 - protein, 7 aa, synthetic construct
KNAEVYP

SEQ ID NO: 38095 - protein, 7 aa, synthetic construct
VDEWKTY

SEQ ID NO: 38096 - protein, 7 aa, synthetic construct
WTDMCKA

SEQ ID NO: 38097 - protein, 7 aa, synthetic construct
YFSGIPV

SEQ ID NO: 38098 - protein, 7 aa, synthetic construct
GVNGCKP

SEQ ID NO: 38099 - protein, 7 aa, synthetic construct
YFSGTVD

SEQ ID NO: 38100 - protein, 7 aa, synthetic construct
GDEWIPY

SEQ ID NO: 38101 - protein, 7 aa, synthetic construct
YFSGKMD

SEQ ID NO: 38102 - protein, 7 aa, synthetic construct
RDEFKSF

SEQ ID NO: 38103 - protein, 7 aa, synthetic construct
YLKSQLY

SEQ ID NO: 38104 - protein, 7 aa, synthetic construct
VPLRGIG

SEQ ID NO: 38105 - protein, 7 aa, synthetic construct
YVRSDSM

SEQ ID NO: 38106 - protein, 7 aa, synthetic construct
YFTGERE

SEQ ID NO: 38107 - protein, 7 aa, synthetic construct
YHRLGQD

SEQ ID NO: 38108 - protein, 7 aa, synthetic construct
RTEFTTY

SEQ ID NO: 38109 - protein, 7 aa, synthetic construct
YFAGVRA

SEQ ID NO: 38110 - protein, 7 aa, synthetic construct
KDDWTPF

SEQ ID NO: 38111 - protein, 7 aa, synthetic construct
WWSGTKE

SEQ ID NO: 38112 - protein, 7 aa, synthetic construct
YFAGKRD

SEQ ID NO: 38113 - protein, 7 aa, synthetic construct
YSRLQFN

SEQ ID NO: 38114 - protein, 7 aa, synthetic construct
YYTGVRE

SEQ ID NO: 38115 - protein, 7 aa, synthetic construct
YTRIGMN

SEQ ID NO: 38116 - protein, 7 aa, synthetic construct
YHRLDPD

SEQ ID NO: 38117 - protein, 7 aa, synthetic construct
YFTGEFE

SEQ ID NO: 38118 - protein, 7 aa, synthetic construct
YFHGQIE

SEQ ID NO: 38119 - protein, 7 aa, synthetic construct
YFQGKID

SEQ ID NO: 38120 - protein, 7 aa, synthetic construct
YFSGIMQ

SEQ ID NO: 38121 - protein, 7 aa, synthetic construct
YFSGQHE

SEQ ID NO: 38122 - protein, 7 aa, synthetic construct
YSRLGAD

SEQ ID NO: 38123 - protein, 7 aa, synthetic construct
IAREGWD

SEQ ID NO: 38124 - protein, 7 aa, synthetic construct
YSRLGMG

SEQ ID NO: 38125 - protein, 7 aa, synthetic construct
RDFDAYP

SEQ ID NO: 38126 - protein, 7 aa, synthetic construct
HMADRGW

SEQ ID NO: 38127 - protein, 7 aa, synthetic construct
YVRSQLN

SEQ ID NO: 38128 - protein, 7 aa, synthetic construct
YFTGERD

SEQ ID NO: 38129 - protein, 7 aa, synthetic construct
RDDFSGW

SEQ ID NO: 38130 - protein, 7 aa, synthetic construct
VLSSQGW

SEQ ID NO: 38131 - protein, 7 aa, synthetic construct
LKDGTGP

SEQ ID NO: 38132 - protein, 7 aa, synthetic construct
VHDYMSY

SEQ ID NO: 38133 - protein, 7 aa, synthetic construct
LHRLHTS

SEQ ID NO: 38134 - protein, 7 aa, synthetic construct
YFHGKID

SEQ ID NO: 38135 - protein, 7 aa, synthetic construct
YSRVQPD

SEQ ID NO: 38136 - protein, 7 aa, synthetic construct
GGPGSHW

SEQ ID NO: 38137 - protein, 7 aa, synthetic construct
YFSRVIE

SEQ ID NO: 38138 - protein, 7 aa, synthetic construct
YYSGIQA

SEQ ID NO: 38139 - protein, 7 aa, synthetic construct
APETVRW

SEQ ID NO: 38140 - protein, 7 aa, synthetic construct
CREGTVR

SEQ ID NO: 38141 - protein, 7 aa, synthetic construct
LEDWVKY

SEQ ID NO: 38142 - protein, 7 aa, synthetic construct
CTSKGGH

SEQ ID NO: 38143 - protein, 7 aa, synthetic construct
LHRLQEY

SEQ ID NO: 38144 - protein, 7 aa, synthetic construct
RSEFMTY

SEQ ID NO: 38145 - protein, 7 aa, synthetic construct
CAPYQHE

SEQ ID NO: 38146 - protein, 7 aa, synthetic construct
YWSGVAA

SEQ ID NO: 38147 - protein, 7 aa, synthetic construct
TKWGDAA

SEQ ID NO: 38148 - protein, 7 aa, synthetic construct
LSRTAFD

SEQ ID NO: 38149 - protein, 7 aa, synthetic construct
YFTGTHS

SEQ ID NO: 38150 - protein, 7 aa, synthetic construct
IMSSKLW

SEQ ID NO: 38151 - protein, 7 aa, synthetic construct
YWAGKLE

SEQ ID NO: 38152 - protein, 7 aa, synthetic construct
YYSGIVS

SEQ ID NO: 38153 - protein, 7 aa, synthetic construct
CKPICCE

SEQ ID NO: 38154 - protein, 7 aa, synthetic construct
RSHDAFP

SEQ ID NO: 38155 - protein, 7 aa, synthetic construct
FFTGKVA

SEQ ID NO: 38156 - protein, 7 aa, synthetic construct
ILSDRMW

SEQ ID NO: 38157 - protein, 7 aa, synthetic construct
EGISRSW

SEQ ID NO: 38158 - protein, 7 aa, synthetic construct
RDEFMSY

SEQ ID NO: 38159 - protein, 7 aa, synthetic construct
GSEYLAW

SEQ ID NO: 38160 - protein, 7 aa, synthetic construct
GNEFSSW

SEQ ID NO: 38161 - protein, 7 aa, synthetic construct
GSGLSHW

SEQ ID NO: 38162 - protein, 7 aa, synthetic construct
RDDFVSY

SEQ ID NO: 38163 - protein, 7 aa, synthetic construct
SMASSSW

SEQ ID NO: 38164 - protein, 7 aa, synthetic construct
YFSGVVN

SEQ ID NO: 38165 - protein, 7 aa, synthetic construct
YFSGQIQ

SEQ ID NO: 38166 - protein, 7 aa, synthetic construct
KDGYSIY

SEQ ID NO: 38167 - protein, 7 aa, synthetic construct
RSEFHSF

SEQ ID NO: 38168 - protein, 7 aa, synthetic construct
YFSGRME

SEQ ID NO: 38169 - protein, 7 aa, synthetic construct
RMDSSGW

SEQ ID NO: 38170 - protein, 7 aa, synthetic construct
YFHGKCD

SEQ ID NO: 38171 - protein, 7 aa, synthetic construct
DTATCLR

SEQ ID NO: 38172 - protein, 7 aa, synthetic construct
RDGNSSW

SEQ ID NO: 38173 - protein, 7 aa, synthetic construct
FAKHGCG

SEQ ID NO: 38174 - protein, 7 aa, synthetic construct
YWTGVPD

SEQ ID NO: 38175 - protein, 7 aa, synthetic construct
YTRLGDG

SEQ ID NO: 38176 - protein, 7 aa, synthetic construct
CKYLKSD

SEQ ID NO: 38177 - protein, 7 aa, synthetic construct
KDGYSSW

SEQ ID NO: 38178 - protein, 7 aa, synthetic construct
YVRSQDN

SEQ ID NO: 38179 - protein, 7 aa, synthetic construct
YTRLDFN

SEQ ID NO: 38180 - protein, 7 aa, synthetic construct
RSEFMSF

SEQ ID NO: 38181 - protein, 7 aa, synthetic construct
YFTGMVD

SEQ ID NO: 38182 - protein, 7 aa, synthetic construct
IAHRGWD

SEQ ID NO: 38183 - protein, 7 aa, synthetic construct
YFTGVHK

SEQ ID NO: 38184 - protein, 7 aa, synthetic construct
YSRLNEQ

SEQ ID NO: 38185 - protein, 7 aa, synthetic construct
LAKTACN

SEQ ID NO: 38186 - protein, 7 aa, synthetic construct
NMTSHSW

SEQ ID NO: 38187 - protein, 7 aa, synthetic construct
KDYTVFP

SEQ ID NO: 38188 - protein, 7 aa, synthetic construct
VAMKGAG

SEQ ID NO: 38189 - protein, 7 aa, synthetic construct
YFSNIKE

SEQ ID NO: 38190 - protein, 7 aa, synthetic construct
GIETVRW

SEQ ID NO: 38191 - protein, 7 aa, synthetic construct
YTRLDNG

SEQ ID NO: 38192 - protein, 7 aa, synthetic construct
CVRPQTP

SEQ ID NO: 38193 - protein, 7 aa, synthetic construct
YFSGIGA

SEQ ID NO: 38194 - protein, 7 aa, synthetic construct
YVKSGPM

SEQ ID NO: 38195 - protein, 7 aa, synthetic construct
YFHGVAA

SEQ ID NO: 38196 - protein, 7 aa, synthetic construct
YFSKVRE

SEQ ID NO: 38197 - protein, 7 aa, synthetic construct
YFTGFHE

SEQ ID NO: 38198 - protein, 7 aa, synthetic construct
YFHGVVE

SEQ ID NO: 38199 - protein, 7 aa, synthetic construct
RLDDRGW

SEQ ID NO: 38200 - protein, 7 aa, synthetic construct
YDKGTWD

SEQ ID NO: 38201 - protein, 7 aa, synthetic construct
RNEFVTY

SEQ ID NO: 38202 - protein, 7 aa, synthetic construct
YTRLNPD

SEQ ID NO: 38203 - protein, 7 aa, synthetic construct
YSRIGPY

SEQ ID NO: 38204 - protein, 7 aa, synthetic construct
IPGFCGP

SEQ ID NO: 38205 - protein, 7 aa, synthetic construct
RMESVIW

SEQ ID NO: 38206 - protein, 7 aa, synthetic construct
YYSGIRE

SEQ ID NO: 38207 - protein, 7 aa, synthetic construct
YFSGKLS

SEQ ID NO: 38208 - protein, 7 aa, synthetic construct
YFTGMRA

SEQ ID NO: 38209 - protein, 7 aa, synthetic construct
RMADRDW

SEQ ID NO: 38210 - protein, 7 aa, synthetic construct
YVKYENP

SEQ ID NO: 38211 - protein, 7 aa, synthetic construct
GGDGSHW

SEQ ID NO: 38212 - protein, 7 aa, synthetic construct
YYTGKCE

SEQ ID NO: 38213 - protein, 7 aa, synthetic construct
YVKSQPM

SEQ ID NO: 38214 - protein, 7 aa, synthetic construct
LLADRTW

SEQ ID NO: 38215 - protein, 7 aa, synthetic construct
YFSGQLD

SEQ ID NO: 38216 - protein, 7 aa, synthetic construct
KMSDHTW

SEQ ID NO: 38217 - protein, 7 aa, synthetic construct
YFSGTHE

SEQ ID NO: 38218 - protein, 7 aa, synthetic construct
YWSGTIA

SEQ ID NO: 38219 - protein, 7 aa, synthetic construct
YSRLHPM

SEQ ID NO: 38220 - protein, 7 aa, synthetic construct
YFSGIHV

SEQ ID NO: 38221 - protein, 7 aa, synthetic construct
YFSGKIN

SEQ ID NO: 38222 - protein, 7 aa, synthetic construct
YFSGKAD

SEQ ID NO: 38223 - protein, 7 aa, synthetic construct
YSRIGPD

SEQ ID NO: 38224 - protein, 7 aa, synthetic construct
RDATSSW

SEQ ID NO: 38225 - protein, 7 aa, synthetic construct
YSRIGGG

SEQ ID NO: 38226 - protein, 7 aa, synthetic construct
YSRLGDD

SEQ ID NO: 38227 - protein, 7 aa, synthetic construct
CDKEPCC

SEQ ID NO: 38228 - protein, 7 aa, synthetic construct
WWSGLKE

SEQ ID NO: 38229 - protein, 7 aa, synthetic construct
YHRIGPN

SEQ ID NO: 38230 - protein, 7 aa, synthetic construct
KFDYSSC

SEQ ID NO: 38231 - protein, 7 aa, synthetic construct
ENDFKIF

SEQ ID NO: 38232 - protein, 7 aa, synthetic construct
IWSTNGV

SEQ ID NO: 38233 - protein, 7 aa, synthetic construct
YFTGFAE

SEQ ID NO: 38234 - protein, 7 aa, synthetic construct
HCEGRPV

SEQ ID NO: 38235 - protein, 7 aa, synthetic construct
YFTGMIA

SEQ ID NO: 38236 - protein, 7 aa, synthetic construct
CGRPQME

SEQ ID NO: 38237 - protein, 7 aa, synthetic construct
RDESSYW

SEQ ID NO: 38238 - protein, 7 aa, synthetic construct
GMEFCRP

SEQ ID NO: 38239 - protein, 7 aa, synthetic construct
CGGGTAG

SEQ ID NO: 38240 - protein, 7 aa, synthetic construct
YFTGVTD

SEQ ID NO: 38241 - protein, 7 aa, synthetic construct
YFAGIIE

SEQ ID NO: 38242 - protein, 7 aa, synthetic construct
YFEGRKE

SEQ ID NO: 38243 - protein, 7 aa, synthetic construct
YLKSQEY

SEQ ID NO: 38244 - protein, 7 aa, synthetic construct
YSKLNVV

SEQ ID NO: 38245 - protein, 7 aa, synthetic construct
LWDGTNP

SEQ ID NO: 38246 - protein, 7 aa, synthetic construct
FFSGILE

SEQ ID NO: 38247 - protein, 7 aa, synthetic construct
YFSAIKE

SEQ ID NO: 38248 - protein, 7 aa, synthetic construct
YWTGKIA

SEQ ID NO: 38249 - protein, 7 aa, synthetic construct
LCRPCDE

SEQ ID NO: 38250 - protein, 7 aa, synthetic construct
FFSGVRE

SEQ ID NO: 38251 - protein, 7 aa, synthetic construct
EPESRKW

SEQ ID NO: 38252 - protein, 7 aa, synthetic construct
HSKMNYN

SEQ ID NO: 38253 - protein, 7 aa, synthetic construct
RDDFSAF

SEQ ID NO: 38254 - protein, 7 aa, synthetic construct
YSRLNDP

SEQ ID NO: 38255 - protein, 7 aa, synthetic construct
YSRLSFD

SEQ ID NO: 38256 - protein, 7 aa, synthetic construct
DDGTSKW

SEQ ID NO: 38257 - protein, 7 aa, synthetic construct
YFTGTNS

SEQ ID NO: 38258 - protein, 7 aa, synthetic construct
YVKYDTS

SEQ ID NO: 38259 - protein, 7 aa, synthetic construct
YSRIGED

SEQ ID NO: 38260 - protein, 7 aa, synthetic construct
YYSGIAA

SEQ ID NO: 38261 - protein, 7 aa, synthetic construct
GGATSSW

SEQ ID NO: 38262 - protein, 7 aa, synthetic construct
YENGCKE

SEQ ID NO: 38263 - protein, 7 aa, synthetic construct
YSRLNLM

SEQ ID NO: 38264 - protein, 7 aa, synthetic construct
KDEFTKY

SEQ ID NO: 38265 - protein, 7 aa, synthetic construct
MWDGTGP

SEQ ID NO: 38266 - protein, 7 aa, synthetic construct
DYACKKE

SEQ ID NO: 38267 - protein, 7 aa, synthetic construct
WTPVCKA

SEQ ID NO: 38268 - protein, 7 aa, synthetic construct
RECGVGP

SEQ ID NO: 38269 - protein, 7 aa, synthetic construct
YFTGKQS

SEQ ID NO: 38270 - protein, 7 aa, synthetic construct
YYTGVVA

SEQ ID NO: 38271 - protein, 7 aa, synthetic construct
KDEFRTY

SEQ ID NO: 38272 - protein, 7 aa, synthetic construct
YHRLGDD

SEQ ID NO: 38273 - protein, 7 aa, synthetic construct
LHRLLPN

SEQ ID NO: 38274 - protein, 7 aa, synthetic construct
RDDYTSW

SEQ ID NO: 38275 - protein, 7 aa, synthetic construct
RDAMSSW

SEQ ID NO: 38276 - protein, 7 aa, synthetic construct
YVRSDPR

SEQ ID NO: 38277 - protein, 7 aa, synthetic construct
YFTGTYS

SEQ ID NO: 38278 - protein, 7 aa, synthetic construct
RLEDRAW

SEQ ID NO: 38279 - protein, 7 aa, synthetic construct
YWRLSDN

SEQ ID NO: 38280 - protein, 7 aa, synthetic construct
LWDGTNA

SEQ ID NO: 38281 - protein, 7 aa, synthetic construct
RDDYSTF

SEQ ID NO: 38282 - protein, 7 aa, synthetic construct
HSRLNIV

SEQ ID NO: 38283 - protein, 7 aa, synthetic construct
YFSGRQE

SEQ ID NO: 38284 - protein, 7 aa, synthetic construct
RHSKLPG

SEQ ID NO: 38285 - protein, 7 aa, synthetic construct
DMESYDW

SEQ ID NO: 38286 - protein, 7 aa, synthetic construct
QLSDRTW

SEQ ID NO: 38287 - protein, 7 aa, synthetic construct
FWSGVKE

SEQ ID NO: 38288 - protein, 7 aa, synthetic construct
YVRSDAM

SEQ ID NO: 38289 - protein, 7 aa, synthetic construct
YFTGTVK

SEQ ID NO: 38290 - protein, 7 aa, synthetic construct
YSVAGCN

SEQ ID NO: 38291 - protein, 7 aa, synthetic construct
YFTGYPD

SEQ ID NO: 38292 - protein, 7 aa, synthetic construct
IMSSAGW

SEQ ID NO: 38293 - protein, 7 aa, synthetic construct
KDEFKTY

SEQ ID NO: 38294 - protein, 7 aa, synthetic construct
DMGDRKW

SEQ ID NO: 38295 - protein, 7 aa, synthetic construct
DMRSANW

SEQ ID NO: 38296 - protein, 7 aa, synthetic construct
YSKKNVN

SEQ ID NO: 38297 - protein, 7 aa, synthetic construct
REPGVRW

SEQ ID NO: 38298 - protein, 7 aa, synthetic construct
REDEVYW

SEQ ID NO: 38299 - protein, 7 aa, synthetic construct
YFTGMTD

SEQ ID NO: 38300 - protein, 7 aa, synthetic construct
YFSGKHD

SEQ ID NO: 38301 - protein, 7 aa, synthetic construct
YFSGTYD

SEQ ID NO: 38302 - protein, 7 aa, synthetic construct
REENVYW

SEQ ID NO: 38303 - protein, 7 aa, synthetic construct
YFSGRTA

SEQ ID NO: 38304 - protein, 7 aa, synthetic construct
VMQASNW

SEQ ID NO: 38305 - protein, 7 aa, synthetic construct
RDDYSTY

SEQ ID NO: 38306 - protein, 7 aa, synthetic construct
TCKAQMG

SEQ ID NO: 38307 - protein, 7 aa, synthetic construct
GSSTSTW

SEQ ID NO: 38308 - protein, 7 aa, synthetic construct
RGDRVFP

SEQ ID NO: 38309 - protein, 7 aa, synthetic construct
LHKLQPC

SEQ ID NO: 38310 - protein, 7 aa, synthetic construct
RLQDVTW

SEQ ID NO: 38311 - protein, 7 aa, synthetic construct
RDDYVHW

SEQ ID NO: 38312 - protein, 7 aa, synthetic construct
LMSDRSW

SEQ ID NO: 38313 - protein, 7 aa, synthetic construct
FHKMNYN

SEQ ID NO: 38314 - protein, 7 aa, synthetic construct
RDDYLSW

SEQ ID NO: 38315 - protein, 7 aa, synthetic construct
YWSGVKL

SEQ ID NO: 38316 - protein, 7 aa, synthetic construct
YFSGILG

SEQ ID NO: 38317 - protein, 7 aa, synthetic construct
YFSGQIM

SEQ ID NO: 38318 - protein, 7 aa, synthetic construct
YFSGTYE

SEQ ID NO: 38319 - protein, 7 aa, synthetic construct
RLESVSW

SEQ ID NO: 38320 - protein, 7 aa, synthetic construct
IWSTNGI

SEQ ID NO: 38321 - protein, 7 aa, synthetic construct
YHARGLN

SEQ ID NO: 38322 - protein, 7 aa, synthetic construct
CAGMCGA

SEQ ID NO: 38323 - protein, 7 aa, synthetic construct
RCERPPA

SEQ ID NO: 38324 - protein, 7 aa, synthetic construct
KDDFSAY

SEQ ID NO: 38325 - protein, 7 aa, synthetic construct
RMEALDW

SEQ ID NO: 38326 - protein, 7 aa, synthetic construct
CKANPPE

SEQ ID NO: 38327 - protein, 7 aa, synthetic construct
VPDFVKW

SEQ ID NO: 38328 - protein, 7 aa, synthetic construct
YWSTIKE

SEQ ID NO: 38329 - protein, 7 aa, synthetic construct
QNEFSTY

SEQ ID NO: 38330 - protein, 7 aa, synthetic construct
DWYGNAA

SEQ ID NO: 38331 - protein, 7 aa, synthetic construct
SMESRTW

SEQ ID NO: 38332 - protein, 7 aa, synthetic construct
RCGGDWP

SEQ ID NO: 38333 - protein, 7 aa, synthetic construct
LCRPCYE

SEQ ID NO: 38334 - protein, 7 aa, synthetic construct
YTRLQNT

SEQ ID NO: 38335 - protein, 7 aa, synthetic construct
YYTGVIA

SEQ ID NO: 38336 - protein, 7 aa, synthetic construct
YFAGRTE

SEQ ID NO: 38337 - protein, 7 aa, synthetic construct
IHRLSPD

SEQ ID NO: 38338 - protein, 7 aa, synthetic construct
YFQGIRE

SEQ ID NO: 38339 - protein, 7 aa, synthetic construct
LHRLHPL

SEQ ID NO: 38340 - protein, 7 aa, synthetic construct
LSKSSIN

SEQ ID NO: 38341 - protein, 7 aa, synthetic construct
YFSGVVP

SEQ ID NO: 38342 - protein, 7 aa, synthetic construct
YFSGISK

SEQ ID NO: 38343 - protein, 7 aa, synthetic construct
KMQDRSW

SEQ ID NO: 38344 - protein, 7 aa, synthetic construct
FFTGTFD

SEQ ID NO: 38345 - protein, 7 aa, synthetic construct
CKAPCCP

SEQ ID NO: 38346 - protein, 7 aa, synthetic construct
YFTGRSD

SEQ ID NO: 38347 - protein, 7 aa, synthetic construct
FWSGVVE

SEQ ID NO: 38348 - protein, 7 aa, synthetic construct
DLKSASW

SEQ ID NO: 38349 - protein, 7 aa, synthetic construct
YVRSDVH

SEQ ID NO: 38350 - protein, 7 aa, synthetic construct
WWSGIPM

SEQ ID NO: 38351 - protein, 7 aa, synthetic construct
FFSGIIA

SEQ ID NO: 38352 - protein, 7 aa, synthetic construct
YHRLSND

SEQ ID NO: 38353 - protein, 7 aa, synthetic construct
YSRLNNL

SEQ ID NO: 38354 - protein, 7 aa, synthetic construct
CAPRLHE

SEQ ID NO: 38355 - protein, 7 aa, synthetic construct
FVKSQPG

SEQ ID NO: 38356 - protein, 7 aa, synthetic construct
LCRPCSV

SEQ ID NO: 38357 - protein, 7 aa, synthetic construct
DMATSTW

SEQ ID NO: 38358 - protein, 7 aa, synthetic construct
YFSGITG

SEQ ID NO: 38359 - protein, 7 aa, synthetic construct
DMGSSNW

SEQ ID NO: 38360 - protein, 7 aa, synthetic construct
YFSGIQH

SEQ ID NO: 38361 - protein, 7 aa, synthetic construct
YWTGVSD

SEQ ID NO: 38362 - protein, 7 aa, synthetic construct
LCKPCLE

SEQ ID NO: 38363 - protein, 7 aa, synthetic construct
ELDSREW

SEQ ID NO: 38364 - protein, 7 aa, synthetic construct
RDDWVKW

SEQ ID NO: 38365 - protein, 7 aa, synthetic construct
YVRSDFR

SEQ ID NO: 38366 - protein, 7 aa, synthetic construct
YFSGIMP

SEQ ID NO: 38367 - protein, 7 aa, synthetic construct
YWTGMLD

SEQ ID NO: 38368 - protein, 7 aa, synthetic construct
YWTGMVD

SEQ ID NO: 38369 - protein, 7 aa, synthetic construct
YVRSDSL

SEQ ID NO: 38370 - protein, 7 aa, synthetic construct
CKPHPLL

SEQ ID NO: 38371 - protein, 7 aa, synthetic construct
NMGSRDW

SEQ ID NO: 38372 - protein, 7 aa, synthetic construct
GDGTKCG

SEQ ID NO: 38373 - protein, 7 aa, synthetic construct
YWSGVPE

SEQ ID NO: 38374 - protein, 7 aa, synthetic construct
VAGKGCG

SEQ ID NO: 38375 - protein, 7 aa, synthetic construct
YFSGRAE

SEQ ID NO: 38376 - protein, 7 aa, synthetic construct
YFAGRFD

SEQ ID NO: 38377 - protein, 7 aa, synthetic construct
KDDYQTW

SEQ ID NO: 38378 - protein, 7 aa, synthetic construct
RNEFTSW

SEQ ID NO: 38379 - protein, 7 aa, synthetic construct
YSRLGED

SEQ ID NO: 38380 - protein, 7 aa, synthetic construct
YSRLSPN

SEQ ID NO: 38381 - protein, 7 aa, synthetic construct
YWTGKVE

SEQ ID NO: 38382 - protein, 7 aa, synthetic construct
GDEYMPF

SEQ ID NO: 38383 - protein, 7 aa, synthetic construct
VPDYVKY

SEQ ID NO: 38384 - protein, 7 aa, synthetic construct
YSRLHID

SEQ ID NO: 38385 - protein, 7 aa, synthetic construct
YSRIGPC

SEQ ID NO: 38386 - protein, 7 aa, synthetic construct
YFSGTVF

SEQ ID NO: 38387 - protein, 7 aa, synthetic construct
KDDWVKY

SEQ ID NO: 38388 - protein, 7 aa, synthetic construct
YFSGQVM

SEQ ID NO: 38389 - protein, 7 aa, synthetic construct
IMASQSW

SEQ ID NO: 38390 - protein, 7 aa, synthetic construct
YSRVGDG

SEQ ID NO: 38391 - protein, 7 aa, synthetic construct
IMEDRGW

SEQ ID NO: 38392 - protein, 7 aa, synthetic construct
YFTGRAD

SEQ ID NO: 38393 - protein, 7 aa, synthetic construct
LWNGEGP

SEQ ID NO: 38394 - protein, 7 aa, synthetic construct
WFSGIKD

SEQ ID NO: 38395 - protein, 7 aa, synthetic construct
VDDYNIY

SEQ ID NO: 38396 - protein, 7 aa, synthetic construct
RTSTNGV

SEQ ID NO: 38397 - protein, 7 aa, synthetic construct
RDEYSPW

SEQ ID NO: 38398 - protein, 7 aa, synthetic construct
YSRLSPM

SEQ ID NO: 38399 - protein, 7 aa, synthetic construct
YFTGVTH

SEQ ID NO: 38400 - protein, 7 aa, synthetic construct
CLRARPE

SEQ ID NO: 38401 - protein, 7 aa, synthetic construct
YFTGQQA

SEQ ID NO: 38402 - protein, 7 aa, synthetic construct
FFTGRID

SEQ ID NO: 38403 - protein, 7 aa, synthetic construct
YFSGMRD

SEQ ID NO: 38404 - protein, 7 aa, synthetic construct
MLPGCKP

SEQ ID NO: 38405 - protein, 7 aa, synthetic construct
RNEFSTF

SEQ ID NO: 38406 - protein, 7 aa, synthetic construct
GVETCKP

SEQ ID NO: 38407 - protein, 7 aa, synthetic construct
YFSGTTE

SEQ ID NO: 38408 - protein, 7 aa, synthetic construct
YVRSQTL

SEQ ID NO: 38409 - protein, 7 aa, synthetic construct
LCKPCSE

SEQ ID NO: 38410 - protein, 7 aa, synthetic construct
REEEVRW

SEQ ID NO: 38411 - protein, 7 aa, synthetic construct
DLQSSVW

SEQ ID NO: 38412 - protein, 7 aa, synthetic construct
CKPSPYP

SEQ ID NO: 38413 - protein, 7 aa, synthetic construct
VMQSRTW

SEQ ID NO: 38414 - protein, 7 aa, synthetic construct
RLPSVYP

SEQ ID NO: 38415 - protein, 7 aa, synthetic construct
KDGYTSW

SEQ ID NO: 38416 - protein, 7 aa, synthetic construct
YSRNSCN

SEQ ID NO: 38417 - protein, 7 aa, synthetic construct
YWSKVLD

SEQ ID NO: 38418 - protein, 7 aa, synthetic construct
YFTGLRD

SEQ ID NO: 38419 - protein, 7 aa, synthetic construct
YIKYDPS

SEQ ID NO: 38420 - protein, 7 aa, synthetic construct
YVRSDTR

SEQ ID NO: 38421 - protein, 7 aa, synthetic construct
YFTGAFD

SEQ ID NO: 38422 - protein, 7 aa, synthetic construct
ILSHATW

SEQ ID NO: 38423 - protein, 7 aa, synthetic construct
YSRLSDP

SEQ ID NO: 38424 - protein, 7 aa, synthetic construct
YFTGRVS

SEQ ID NO: 38425 - protein, 7 aa, synthetic construct
YYTGIRD

SEQ ID NO: 38426 - protein, 7 aa, synthetic construct
YWTGVQD

SEQ ID NO: 38427 - protein, 7 aa, synthetic construct
YFSGVMH

SEQ ID NO: 38428 - protein, 7 aa, synthetic construct
RDDFTGW

SEQ ID NO: 38429 - protein, 7 aa, synthetic construct
YFHGIRE

SEQ ID NO: 38430 - protein, 7 aa, synthetic construct
YFSGQRE

SEQ ID NO: 38431 - protein, 7 aa, synthetic construct
YSRIGPL

SEQ ID NO: 38432 - protein, 7 aa, synthetic construct
RDEYVHW

SEQ ID NO: 38433 - protein, 7 aa, synthetic construct
YSRISDN

SEQ ID NO: 38434 - protein, 7 aa, synthetic construct
YFSGQIK

SEQ ID NO: 38435 - protein, 7 aa, synthetic construct
YFHGKLD

SEQ ID NO: 38436 - protein, 7 aa, synthetic construct
FSRLSAN

SEQ ID NO: 38437 - protein, 7 aa, synthetic construct
YVRSDIG

SEQ ID NO: 38438 - protein, 7 aa, synthetic construct
RSEFATY

SEQ ID NO: 38439 - protein, 7 aa, synthetic construct
YFQGRIA

SEQ ID NO: 38440 - protein, 7 aa, synthetic construct
YEPNCKE

SEQ ID NO: 38441 - protein, 7 aa, synthetic construct
REEMVSW

SEQ ID NO: 38442 - protein, 7 aa, synthetic construct
RMEERSW

SEQ ID NO: 38443 - protein, 7 aa, synthetic construct
QNDYVSY

SEQ ID NO: 38444 - protein, 7 aa, synthetic construct
RDGTCKP

SEQ ID NO: 38445 - protein, 7 aa, synthetic construct
YSRLQPT

SEQ ID NO: 38446 - protein, 7 aa, synthetic construct
DMRDRIW

SEQ ID NO: 38447 - protein, 7 aa, synthetic construct
CKATIPG

SEQ ID NO: 38448 - protein, 7 aa, synthetic construct
YFTGMYD

SEQ ID NO: 38449 - protein, 7 aa, synthetic construct
HNSTNGR

SEQ ID NO: 38450 - protein, 7 aa, synthetic construct
VPEDCRP

SEQ ID NO: 38451 - protein, 7 aa, synthetic construct
RPLMEKC

SEQ ID NO: 38452 - protein, 7 aa, synthetic construct
YFSGVTS

SEQ ID NO: 38453 - protein, 7 aa, synthetic construct
EPESRAW

SEQ ID NO: 38454 - protein, 7 aa, synthetic construct
RDEFVTY

SEQ ID NO: 38455 - protein, 7 aa, synthetic construct
PMGSQTW

SEQ ID NO: 38456 - protein, 7 aa, synthetic construct
STYDSYP

SEQ ID NO: 38457 - protein, 7 aa, synthetic construct
LWDGTSP

SEQ ID NO: 38458 - protein, 7 aa, synthetic construct
YSRIQID

SEQ ID NO: 38459 - protein, 7 aa, synthetic construct
YIKSQSC

SEQ ID NO: 38460 - protein, 7 aa, synthetic construct
YVKSQCS

SEQ ID NO: 38461 - protein, 7 aa, synthetic construct
YHRLSPV

SEQ ID NO: 38462 - protein, 7 aa, synthetic construct
GGEYSTW

SEQ ID NO: 38463 - protein, 7 aa, synthetic construct
YFSGKPN

SEQ ID NO: 38464 - protein, 7 aa, synthetic construct
YSRLSEL

SEQ ID NO: 38465 - protein, 7 aa, synthetic construct
YFAGRME

SEQ ID NO: 38466 - protein, 7 aa, synthetic construct
KDEYKYY

SEQ ID NO: 38467 - protein, 7 aa, synthetic construct
YFTGVRS

SEQ ID NO: 38468 - protein, 7 aa, synthetic construct
GAGTSRW

SEQ ID NO: 38469 - protein, 7 aa, synthetic construct
YFTGRHD

SEQ ID NO: 38470 - protein, 7 aa, synthetic construct
CKPQTAT

SEQ ID NO: 38471 - protein, 7 aa, synthetic construct
CVEGRAP

SEQ ID NO: 38472 - protein, 7 aa, synthetic construct
AGADRGW

SEQ ID NO: 38473 - protein, 7 aa, synthetic construct
VASKGAG

SEQ ID NO: 38474 - protein, 7 aa, synthetic construct
YFSGRID

SEQ ID NO: 38475 - protein, 7 aa, synthetic construct
YFSGTQD

SEQ ID NO: 38476 - protein, 7 aa, synthetic construct
RDEFVKW

SEQ ID NO: 38477 - protein, 7 aa, synthetic construct
YFTNIKE

SEQ ID NO: 38478 - protein, 7 aa, synthetic construct
KEDYTTW

SEQ ID NO: 38479 - protein, 7 aa, synthetic construct
YVKSGPP

SEQ ID NO: 38480 - protein, 7 aa, synthetic construct
YFSGIPH

SEQ ID NO: 38481 - protein, 7 aa, synthetic construct
YFTGEVA

SEQ ID NO: 38482 - protein, 7 aa, synthetic construct
CGSKTGH

SEQ ID NO: 38483 - protein, 7 aa, synthetic construct
YFSGTRD

SEQ ID NO: 38484 - protein, 7 aa, synthetic construct
GVPGVMW

SEQ ID NO: 38485 - protein, 7 aa, synthetic construct
YVKSQGM

SEQ ID NO: 38486 - protein, 7 aa, synthetic construct
MWDGTEA

SEQ ID NO: 38487 - protein, 7 aa, synthetic construct
YARTSIN

SEQ ID NO: 38488 - protein, 7 aa, synthetic construct
YFTGKAQ

SEQ ID NO: 38489 - protein, 7 aa, synthetic construct
YSPGCKE

SEQ ID NO: 38490 - protein, 7 aa, synthetic construct
WWSGITD

SEQ ID NO: 38491 - protein, 7 aa, synthetic construct
KDGYSVY

SEQ ID NO: 38492 - protein, 7 aa, synthetic construct
KDGHSLW

SEQ ID NO: 38493 - protein, 7 aa, synthetic construct
RDAEVYP

SEQ ID NO: 38494 - protein, 7 aa, synthetic construct
LCQPCLT

SEQ ID NO: 38495 - protein, 7 aa, synthetic construct
YFMGKQD

SEQ ID NO: 38496 - protein, 7 aa, synthetic construct
LIRPCSE

SEQ ID NO: 38497 - protein, 7 aa, synthetic construct
CKAPSAG

SEQ ID NO: 38498 - protein, 7 aa, synthetic construct
YVRSDTH

SEQ ID NO: 38499 - protein, 7 aa, synthetic construct
YFTGQRD

SEQ ID NO: 38500 - protein, 7 aa, synthetic construct
GGATSRW

SEQ ID NO: 38501 - protein, 7 aa, synthetic construct
GGPSSTW

SEQ ID NO: 38502 - protein, 7 aa, synthetic construct
IMGKCPG

SEQ ID NO: 38503 - protein, 7 aa, synthetic construct
RDELTSW

SEQ ID NO: 38504 - protein, 7 aa, synthetic construct
RESTHGV

SEQ ID NO: 38505 - protein, 7 aa, synthetic construct
YTRLQTG

SEQ ID NO: 38506 - protein, 7 aa, synthetic construct
ARSTNGV

SEQ ID NO: 38507 - protein, 7 aa, synthetic construct
YHRLSES

SEQ ID NO: 38508 - protein, 7 aa, synthetic construct
YFTNIRE

SEQ ID NO: 38509 - protein, 7 aa, synthetic construct
CKPGAGI

SEQ ID NO: 38510 - protein, 7 aa, synthetic construct
YFSGKQD

SEQ ID NO: 38511 - protein, 7 aa, synthetic construct
YFSGITV

SEQ ID NO: 38512 - protein, 7 aa, synthetic construct
YWTGTTA

SEQ ID NO: 38513 - protein, 7 aa, synthetic construct
LSRLQMN

SEQ ID NO: 38514 - protein, 7 aa, synthetic construct
KDEYLTF

SEQ ID NO: 38515 - protein, 7 aa, synthetic construct
VAREGWD

SEQ ID NO: 38516 - protein, 7 aa, synthetic construct
YGKGTWD

SEQ ID NO: 38517 - protein, 7 aa, synthetic construct
YWTGMLE

SEQ ID NO: 38518 - protein, 7 aa, synthetic construct
MLSDRKW

SEQ ID NO: 38519 - protein, 7 aa, synthetic construct
ARQCLPM

SEQ ID NO: 38520 - protein, 7 aa, synthetic construct
RLDHVFP

SEQ ID NO: 38521 - protein, 7 aa, synthetic construct
YSRCSDN

SEQ ID NO: 38522 - protein, 7 aa, synthetic construct
CKPQSGA

SEQ ID NO: 38523 - protein, 7 aa, synthetic construct
YWSGVID

SEQ ID NO: 38524 - protein, 7 aa, synthetic construct
YFTGQIN

SEQ ID NO: 38525 - protein, 7 aa, synthetic construct
RNEFTGY

SEQ ID NO: 38526 - protein, 7 aa, synthetic construct
ENEFKIF

SEQ ID NO: 38527 - protein, 7 aa, synthetic construct
CTSKTSH

SEQ ID NO: 38528 - protein, 7 aa, synthetic construct
DMGSSQW

SEQ ID NO: 38529 - protein, 7 aa, synthetic construct
TKDGLCA

SEQ ID NO: 38530 - protein, 7 aa, synthetic construct
GSDHVRW

SEQ ID NO: 38531 - protein, 7 aa, synthetic construct
YFSGKTS

SEQ ID NO: 38532 - protein, 7 aa, synthetic construct
YFTGQQS

SEQ ID NO: 38533 - protein, 7 aa, synthetic construct
YFTGFTE

SEQ ID NO: 38534 - protein, 7 aa, synthetic construct
VMEDRRW

SEQ ID NO: 38535 - protein, 7 aa, synthetic construct
RGDRVYP

SEQ ID NO: 38536 - protein, 7 aa, synthetic construct
YFSGQIL

SEQ ID NO: 38537 - protein, 7 aa, synthetic construct
YFTGRQD

SEQ ID NO: 38538 - protein, 7 aa, synthetic construct
YYTGVIE

SEQ ID NO: 38539 - protein, 7 aa, synthetic construct
YSKLDTN

SEQ ID NO: 38540 - protein, 7 aa, synthetic construct
LMSDREW

SEQ ID NO: 38541 - protein, 7 aa, synthetic construct
LARTGRD

SEQ ID NO: 38542 - protein, 7 aa, synthetic construct
HGKGECP

SEQ ID NO: 38543 - protein, 7 aa, synthetic construct
WSRDTCN

SEQ ID NO: 38544 - protein, 7 aa, synthetic construct
GGPGVRW

SEQ ID NO: 38545 - protein, 7 aa, synthetic construct
YSRVQPN

SEQ ID NO: 38546 - protein, 7 aa, synthetic construct
LKDGTCI

SEQ ID NO: 38547 - protein, 7 aa, synthetic construct
YPFPQAA

SEQ ID NO: 38548 - protein, 7 aa, synthetic construct
YFSGVRS

SEQ ID NO: 38549 - protein, 7 aa, synthetic construct
GGEFSKW

SEQ ID NO: 38550 - protein, 7 aa, synthetic construct
CRPKQVD

SEQ ID NO: 38551 - protein, 7 aa, synthetic construct
YFSGTRE

SEQ ID NO: 38552 - protein, 7 aa, synthetic construct
YHRLQED

SEQ ID NO: 38553 - protein, 7 aa, synthetic construct
LWDGTPS

SEQ ID NO: 38554 - protein, 7 aa, synthetic construct
RMDAVTW

SEQ ID NO: 38555 - protein, 7 aa, synthetic construct
NMASTTW

SEQ ID NO: 38556 - protein, 7 aa, synthetic construct
RGESRGW

SEQ ID NO: 38557 - protein, 7 aa, synthetic construct
LLASSSW

SEQ ID NO: 38558 - protein, 7 aa, synthetic construct
IPSSVRW

SEQ ID NO: 38559 - protein, 7 aa, synthetic construct
RDDFSVY

SEQ ID NO: 38560 - protein, 7 aa, synthetic construct
LRDGSPA

SEQ ID NO: 38561 - protein, 7 aa, synthetic construct
YWAGVRE

SEQ ID NO: 38562 - protein, 7 aa, synthetic construct
WWSGVAE

SEQ ID NO: 38563 - protein, 7 aa, synthetic construct
KYDHVTW

SEQ ID NO: 38564 - protein, 7 aa, synthetic construct
YFSGVPH

SEQ ID NO: 38565 - protein, 7 aa, synthetic construct
YVRSDAT

SEQ ID NO: 38566 - protein, 7 aa, synthetic construct
RDEFHAW

SEQ ID NO: 38567 - protein, 7 aa, synthetic construct
YFSGTQA

SEQ ID NO: 38568 - protein, 7 aa, synthetic construct
GSEMSHW

SEQ ID NO: 38569 - protein, 7 aa, synthetic construct
YARTSPL

SEQ ID NO: 38570 - protein, 7 aa, synthetic construct
CKPEMVR

SEQ ID NO: 38571 - protein, 7 aa, synthetic construct
RTYDAYP

SEQ ID NO: 38572 - protein, 7 aa, synthetic construct
MWDGTPS

SEQ ID NO: 38573 - protein, 7 aa, synthetic construct
CSRDGEN

SEQ ID NO: 38574 - protein, 7 aa, synthetic construct
YYTGRME

SEQ ID NO: 38575 - protein, 7 aa, synthetic construct
DMESSKW

SEQ ID NO: 38576 - protein, 7 aa, synthetic construct
GSEYLTW

SEQ ID NO: 38577 - protein, 7 aa, synthetic construct
YTRLDSH

SEQ ID NO: 38578 - protein, 7 aa, synthetic construct
RNDFVSF

SEQ ID NO: 38579 - protein, 7 aa, synthetic construct
REDFSTW

SEQ ID NO: 38580 - protein, 7 aa, synthetic construct
GSGTSHW

SEQ ID NO: 38581 - protein, 7 aa, synthetic construct
CKPRQGE

SEQ ID NO: 38582 - protein, 7 aa, synthetic construct
RNEFSTY

SEQ ID NO: 38583 - protein, 7 aa, synthetic construct
YYTGKCN

SEQ ID NO: 38584 - protein, 7 aa, synthetic construct
KTDYVTW

SEQ ID NO: 38585 - protein, 7 aa, synthetic construct
YFAGTIN

SEQ ID NO: 38586 - protein, 7 aa, synthetic construct
YFSGRLD

SEQ ID NO: 38587 - protein, 7 aa, synthetic construct
YFAGIIG

SEQ ID NO: 38588 - protein, 7 aa, synthetic construct
YSRLNEF

SEQ ID NO: 38589 - protein, 7 aa, synthetic construct
YSRIGFD

SEQ ID NO: 38590 - protein, 7 aa, synthetic construct
RDETSYW

SEQ ID NO: 38591 - protein, 7 aa, synthetic construct
RDGTSRW

SEQ ID NO: 38592 - protein, 7 aa, synthetic construct
YSRAGMD

SEQ ID NO: 38593 - protein, 7 aa, synthetic construct
RDGSSRW

SEQ ID NO: 38594 - protein, 7 aa, synthetic construct
MMDGTPA

SEQ ID NO: 38595 - protein, 7 aa, synthetic construct
YSRIQFD

SEQ ID NO: 38596 - protein, 7 aa, synthetic construct
CKSNNEP

SEQ ID NO: 38597 - protein, 7 aa, synthetic construct
RDEVTSW

SEQ ID NO: 38598 - protein, 7 aa, synthetic construct
KYAFSTE

SEQ ID NO: 38599 - protein, 7 aa, synthetic construct
DLDSYKW

SEQ ID NO: 38600 - protein, 7 aa, synthetic construct
CGAKCCP

SEQ ID NO: 38601 - protein, 7 aa, synthetic construct
WSRDCDN

SEQ ID NO: 38602 - protein, 7 aa, synthetic construct
YSRIQDD

SEQ ID NO: 38603 - protein, 7 aa, synthetic construct
RDGISAW

SEQ ID NO: 38604 - protein, 7 aa, synthetic construct
YFSGIHN

SEQ ID NO: 38605 - protein, 7 aa, synthetic construct
RGDSPKW

SEQ ID NO: 38606 - protein, 7 aa, synthetic construct
YFSGQSE

SEQ ID NO: 38607 - protein, 7 aa, synthetic construct
YFSGMRE

SEQ ID NO: 38608 - protein, 7 aa, synthetic construct
RLESYDW

SEQ ID NO: 38609 - protein, 7 aa, synthetic construct
IEGRGWD

SEQ ID NO: 38610 - protein, 7 aa, synthetic construct
RMEDRKW

SEQ ID NO: 38611 - protein, 7 aa, synthetic construct
YSRVQLN

SEQ ID NO: 38612 - protein, 7 aa, synthetic construct
YSRIQMD

SEQ ID NO: 38613 - protein, 7 aa, synthetic construct
CQGQGNP

SEQ ID NO: 38614 - protein, 7 aa, synthetic construct
YSRIAPD

SEQ ID NO: 38615 - protein, 7 aa, synthetic construct
YHRLSAD

SEQ ID NO: 38616 - protein, 7 aa, synthetic construct
NLESRGW

SEQ ID NO: 38617 - protein, 7 aa, synthetic construct
CGKMCCP

SEQ ID NO: 38618 - protein, 7 aa, synthetic construct
YWTGTVD

SEQ ID NO: 38619 - protein, 7 aa, synthetic construct
YFHGKKD

SEQ ID NO: 38620 - protein, 7 aa, synthetic construct
YSRLSEN

SEQ ID NO: 38621 - protein, 7 aa, synthetic construct
RSPDVYP

SEQ ID NO: 38622 - protein, 7 aa, synthetic construct
GCYKGPP

SEQ ID NO: 38623 - protein, 7 aa, synthetic construct
RESDNGI

SEQ ID NO: 38624 - protein, 7 aa, synthetic construct
WCREGTP

SEQ ID NO: 38625 - protein, 7 aa, synthetic construct
YTHSNKF

SEQ ID NO: 38626 - protein, 7 aa, synthetic construct
LHRLSNG

SEQ ID NO: 38627 - protein, 7 aa, synthetic construct
YFSGVQD

SEQ ID NO: 38628 - protein, 7 aa, synthetic construct
CDGSHKA

SEQ ID NO: 38629 - protein, 7 aa, synthetic construct
YARTSPM

SEQ ID NO: 38630 - protein, 7 aa, synthetic construct
YSRLQSD

SEQ ID NO: 38631 - protein, 7 aa, synthetic construct
YSRIQLN

SEQ ID NO: 38632 - protein, 7 aa, synthetic construct
YHKHGPQ

SEQ ID NO: 38633 - protein, 7 aa, synthetic construct
YVKSDGS

SEQ ID NO: 38634 - protein, 7 aa, synthetic construct
FFTGTYD

SEQ ID NO: 38635 - protein, 7 aa, synthetic construct
YFSGVMQ

SEQ ID NO: 38636 - protein, 7 aa, synthetic construct
CKPGMGP

SEQ ID NO: 38637 - protein, 7 aa, synthetic construct
RDGASTW

SEQ ID NO: 38638 - protein, 7 aa, synthetic construct
YVRSDNR

SEQ ID NO: 38639 - protein, 7 aa, synthetic construct
DMYVGSC

SEQ ID NO: 38640 - protein, 7 aa, synthetic construct
KNDYTVF

SEQ ID NO: 38641 - protein, 7 aa, synthetic construct
CKMPMRD

SEQ ID NO: 38642 - protein, 7 aa, synthetic construct
PYARSPA

SEQ ID NO: 38643 - protein, 7 aa, synthetic construct
YFSGTLS

SEQ ID NO: 38644 - protein, 7 aa, synthetic construct
CKLQPPP

SEQ ID NO: 38645 - protein, 7 aa, synthetic construct
YPSGGPG

SEQ ID NO: 38646 - protein, 7 aa, synthetic construct
SDGVSLW

SEQ ID NO: 38647 - protein, 7 aa, synthetic construct
MSEFVSF

SEQ ID NO: 38648 - protein, 7 aa, synthetic construct
KEDSRTW

SEQ ID NO: 38649 - protein, 7 aa, synthetic construct
CAPYVHE

SEQ ID NO: 38650 - protein, 7 aa, synthetic construct
PYARSPM

SEQ ID NO: 38651 - protein, 7 aa, synthetic construct
FTRLSIN

SEQ ID NO: 38652 - protein, 7 aa, synthetic construct
LHKLQVY

SEQ ID NO: 38653 - protein, 7 aa, synthetic construct
VSEFQSY

SEQ ID NO: 38654 - protein, 7 aa, synthetic construct
YSRISPN

SEQ ID NO: 38655 - protein, 7 aa, synthetic construct
RSEFAVY

SEQ ID NO: 38656 - protein, 7 aa, synthetic construct
YFTGVTG

SEQ ID NO: 38657 - protein, 7 aa, synthetic construct
YFSGRLL

SEQ ID NO: 38658 - protein, 7 aa, synthetic construct
YWSGVTD

SEQ ID NO: 38659 - protein, 7 aa, synthetic construct
YFEGRVD

SEQ ID NO: 38660 - protein, 7 aa, synthetic construct
ILDSRKW

SEQ ID NO: 38661 - protein, 7 aa, synthetic construct
YEPGCKV

SEQ ID NO: 38662 - protein, 7 aa, synthetic construct
YFQGRIE

SEQ ID NO: 38663 - protein, 7 aa, synthetic construct
CRTGQPA

SEQ ID NO: 38664 - protein, 7 aa, synthetic construct
FFSGIME

SEQ ID NO: 38665 - protein, 7 aa, synthetic construct
DLRSKTW

SEQ ID NO: 38666 - protein, 7 aa, synthetic construct
NMSSRGW

SEQ ID NO: 38667 - protein, 7 aa, synthetic construct
YFSGTIQ

SEQ ID NO: 38668 - protein, 7 aa, synthetic construct
RGEFVMF

SEQ ID NO: 38669 - protein, 7 aa, synthetic construct
YFSGRSE

SEQ ID NO: 38670 - protein, 7 aa, synthetic construct
LWDGTMA

SEQ ID NO: 38671 - protein, 7 aa, synthetic construct
VDEWLPF

SEQ ID NO: 38672 - protein, 7 aa, synthetic construct
LCRPCSM

SEQ ID NO: 38673 - protein, 7 aa, synthetic construct
YFSGKQS

SEQ ID NO: 38674 - protein, 7 aa, synthetic construct
GVETVRW

SEQ ID NO: 38675 - protein, 7 aa, synthetic construct
LCRPLSE

SEQ ID NO: 38676 - protein, 7 aa, synthetic construct
YFHGKQE

SEQ ID NO: 38677 - protein, 7 aa, synthetic construct
YFTGKPE

SEQ ID NO: 38678 - protein, 7 aa, synthetic construct
YFSGTVM

SEQ ID NO: 38679 - protein, 7 aa, synthetic construct
YFSGKIT

SEQ ID NO: 38680 - protein, 7 aa, synthetic construct
YFSGQNE

SEQ ID NO: 38681 - protein, 7 aa, synthetic construct
YSSIGPN

SEQ ID NO: 38682 - protein, 7 aa, synthetic construct
TDGYSSW

SEQ ID NO: 38683 - protein, 7 aa, synthetic construct
CNKPTTA

SEQ ID NO: 38684 - protein, 7 aa, synthetic construct
PCGKPPP

SEQ ID NO: 38685 - protein, 7 aa, synthetic construct
DMTDRKW

SEQ ID NO: 38686 - protein, 7 aa, synthetic construct
CAPDYRP

SEQ ID NO: 38687 - protein, 7 aa, synthetic construct
YYTGKIS

SEQ ID NO: 38688 - protein, 7 aa, synthetic construct
CKPPSDY

SEQ ID NO: 38689 - protein, 7 aa, synthetic construct
DLRDRTW

SEQ ID NO: 38690 - protein, 7 aa, synthetic construct
RTFDAYP

SEQ ID NO: 38691 - protein, 7 aa, synthetic construct
FFTGKIE

SEQ ID NO: 38692 - protein, 7 aa, synthetic construct
GDGSSRW

SEQ ID NO: 38693 - protein, 7 aa, synthetic construct
DLQSIKW

SEQ ID NO: 38694 - protein, 7 aa, synthetic construct
YFTGKVG

SEQ ID NO: 38695 - protein, 7 aa, synthetic construct
YSRIGPG

SEQ ID NO: 38696 - protein, 7 aa, synthetic construct
YFSGQTD

SEQ ID NO: 38697 - protein, 7 aa, synthetic construct
MWDGTMA

SEQ ID NO: 38698 - protein, 7 aa, synthetic construct
YYTGIVS

SEQ ID NO: 38699 - protein, 7 aa, synthetic construct
YFAGKHE

SEQ ID NO: 38700 - protein, 7 aa, synthetic construct
YFSGQLA

SEQ ID NO: 38701 - protein, 7 aa, synthetic construct
YFHGQVA

SEQ ID NO: 38702 - protein, 7 aa, synthetic construct
MWDGTIA

SEQ ID NO: 38703 - protein, 7 aa, synthetic construct
YARMGPD

SEQ ID NO: 38704 - protein, 7 aa, synthetic construct
GGATSHW

SEQ ID NO: 38705 - protein, 7 aa, synthetic construct
RPDTVRW

SEQ ID NO: 38706 - protein, 7 aa, synthetic construct
FFSGQVD

SEQ ID NO: 38707 - protein, 7 aa, synthetic construct
GSEFKVF

SEQ ID NO: 38708 - protein, 7 aa, synthetic construct
YVRSQTS

SEQ ID NO: 38709 - protein, 7 aa, synthetic construct
GCRHGTI

SEQ ID NO: 38710 - protein, 7 aa, synthetic construct
GSEFMSY

SEQ ID NO: 38711 - protein, 7 aa, synthetic construct
DLRAANW

SEQ ID NO: 38712 - protein, 7 aa, synthetic construct
YHRLSEN

SEQ ID NO: 38713 - protein, 7 aa, synthetic construct
WWTGIAD

SEQ ID NO: 38714 - protein, 7 aa, synthetic construct
YFTGRTD

SEQ ID NO: 38715 - protein, 7 aa, synthetic construct
YFAGVKG

SEQ ID NO: 38716 - protein, 7 aa, synthetic construct
CKEGVRW

SEQ ID NO: 38717 - protein, 7 aa, synthetic construct
LARSAPD

SEQ ID NO: 38718 - protein, 7 aa, synthetic construct
YHRLSQD

SEQ ID NO: 38719 - protein, 7 aa, synthetic construct
YVRSDSR

SEQ ID NO: 38720 - protein, 7 aa, synthetic construct
FSVYTGS

SEQ ID NO: 38721 - protein, 7 aa, synthetic construct
VAPKCAE

SEQ ID NO: 38722 - protein, 7 aa, synthetic construct
RDDFSLW

SEQ ID NO: 38723 - protein, 7 aa, synthetic construct
YWSGTID

SEQ ID NO: 38724 - protein, 7 aa, synthetic construct
YSRLNYD

SEQ ID NO: 38725 - protein, 7 aa, synthetic construct
VPDFVRY

SEQ ID NO: 38726 - protein, 7 aa, synthetic construct
YHKYNVN

SEQ ID NO: 38727 - protein, 7 aa, synthetic construct
YSRLHAN

SEQ ID NO: 38728 - protein, 7 aa, synthetic construct
CIGECCP

SEQ ID NO: 38729 - protein, 7 aa, synthetic construct
HDGVSKW

SEQ ID NO: 38730 - protein, 7 aa, synthetic construct
YFTGKIG

SEQ ID NO: 38731 - protein, 7 aa, synthetic construct
YWSGVRE

SEQ ID NO: 38732 - protein, 7 aa, synthetic construct
YFSGVRV

SEQ ID NO: 38733 - protein, 7 aa, synthetic construct
CTSATGH

SEQ ID NO: 38734 - protein, 7 aa, synthetic construct
CKEKCCE

SEQ ID NO: 38735 - protein, 7 aa, synthetic construct
FPGSCKE

SEQ ID NO: 38736 - protein, 7 aa, synthetic construct
RDADVYP

SEQ ID NO: 38737 - protein, 7 aa, synthetic construct
CASKTGH

SEQ ID NO: 38738 - protein, 7 aa, synthetic construct
CRPNTHP

SEQ ID NO: 38739 - protein, 7 aa, synthetic construct
YFSGVKI

SEQ ID NO: 38740 - protein, 7 aa, synthetic construct
YWSGTVA

SEQ ID NO: 38741 - protein, 7 aa, synthetic construct
KSDFTSY

SEQ ID NO: 38742 - protein, 7 aa, synthetic construct
VSTHCYA

SEQ ID NO: 38743 - protein, 7 aa, synthetic construct
YYSGVLA

SEQ ID NO: 38744 - protein, 7 aa, synthetic construct
RDGQSSW

SEQ ID NO: 38745 - protein, 7 aa, synthetic construct
YSRAGFD

SEQ ID NO: 38746 - protein, 7 aa, synthetic construct
CKSEHVR

SEQ ID NO: 38747 - protein, 7 aa, synthetic construct
KVDHVRW

SEQ ID NO: 38748 - protein, 7 aa, synthetic construct
YFSGVRA

SEQ ID NO: 38749 - protein, 7 aa, synthetic construct
YFTGQCE

SEQ ID NO: 38750 - protein, 7 aa, synthetic construct
RSEFHGY

SEQ ID NO: 38751 - protein, 7 aa, synthetic construct
LHRLSMG

SEQ ID NO: 38752 - protein, 7 aa, synthetic construct
IMPSRNW

SEQ ID NO: 38753 - protein, 7 aa, synthetic construct
YHRLSDN

SEQ ID NO: 38754 - protein, 7 aa, synthetic construct
FFSGVTA

SEQ ID NO: 38755 - protein, 7 aa, synthetic construct
RTPTTFP

SEQ ID NO: 38756 - protein, 7 aa, synthetic construct
VMSSRTW

SEQ ID NO: 38757 - protein, 7 aa, synthetic construct
YWAGIRE

SEQ ID NO: 38758 - protein, 7 aa, synthetic construct
WLKSQPG

SEQ ID NO: 38759 - protein, 7 aa, synthetic construct
YSRLSPA

SEQ ID NO: 38760 - protein, 7 aa, synthetic construct
MHRLTMD

SEQ ID NO: 38761 - protein, 7 aa, synthetic construct
REEWVAY

SEQ ID NO: 38762 - protein, 7 aa, synthetic construct
YFTGVRN

SEQ ID NO: 38763 - protein, 7 aa, synthetic construct
YWSKVQA

SEQ ID NO: 38764 - protein, 7 aa, synthetic construct
YHRLGDN

SEQ ID NO: 38765 - protein, 7 aa, synthetic construct
RGGTSAW

SEQ ID NO: 38766 - protein, 7 aa, synthetic construct
YLHSQSY

SEQ ID NO: 38767 - protein, 7 aa, synthetic construct
DMGSAAW

SEQ ID NO: 38768 - protein, 7 aa, synthetic construct
CKATEVS

SEQ ID NO: 38769 - protein, 7 aa, synthetic construct
YFSGVHK

SEQ ID NO: 38770 - protein, 7 aa, synthetic construct
YFTGEVS

SEQ ID NO: 38771 - protein, 7 aa, synthetic construct
FARMNCN

SEQ ID NO: 38772 - protein, 7 aa, synthetic construct
KDGYSGW

SEQ ID NO: 38773 - protein, 7 aa, synthetic construct
REDSSRW

SEQ ID NO: 38774 - protein, 7 aa, synthetic construct
YVRSGCG

SEQ ID NO: 38775 - protein, 7 aa, synthetic construct
SLESRAW

SEQ ID NO: 38776 - protein, 7 aa, synthetic construct
CKGDKHG

SEQ ID NO: 38777 - protein, 7 aa, synthetic construct
YFSGILP

SEQ ID NO: 38778 - protein, 7 aa, synthetic construct
YVRSQPI

SEQ ID NO: 38779 - protein, 7 aa, synthetic construct
CYKKLPD

SEQ ID NO: 38780 - protein, 7 aa, synthetic construct
RDGYSAW

SEQ ID NO: 38781 - protein, 7 aa, synthetic construct
PFARSVE

SEQ ID NO: 38782 - protein, 7 aa, synthetic construct
REDWVQF

SEQ ID NO: 38783 - protein, 7 aa, synthetic construct
YFHGRLE

SEQ ID NO: 38784 - protein, 7 aa, synthetic construct
YYTGITE

SEQ ID NO: 38785 - protein, 7 aa, synthetic construct
RDLDVYP

SEQ ID NO: 38786 - protein, 7 aa, synthetic construct
GVTAVKW

SEQ ID NO: 38787 - protein, 7 aa, synthetic construct
RDGMSSW

SEQ ID NO: 38788 - protein, 7 aa, synthetic construct
YFTGVTN

SEQ ID NO: 38789 - protein, 7 aa, synthetic construct
LMRPCSE

SEQ ID NO: 38790 - protein, 7 aa, synthetic construct
FSRLSIN

SEQ ID NO: 38791 - protein, 7 aa, synthetic construct
CTSKTGT

SEQ ID NO: 38792 - protein, 7 aa, synthetic construct
LSRAQFN

SEQ ID NO: 38793 - protein, 7 aa, synthetic construct
RSEYTTF

SEQ ID NO: 38794 - protein, 7 aa, synthetic construct
MWDGTAA

SEQ ID NO: 38795 - protein, 7 aa, synthetic construct
YVRSDTT

SEQ ID NO: 38796 - protein, 7 aa, synthetic construct
YWTGKVD

SEQ ID NO: 38797 - protein, 7 aa, synthetic construct
FFSGRVE

SEQ ID NO: 38798 - protein, 7 aa, synthetic construct
MDGNSRW

SEQ ID NO: 38799 - protein, 7 aa, synthetic construct
YVKSCPL

SEQ ID NO: 38800 - protein, 7 aa, synthetic construct
YWQGVKE

SEQ ID NO: 38801 - protein, 7 aa, synthetic construct
WWSGTRE

SEQ ID NO: 38802 - protein, 7 aa, synthetic construct
RLDHVYP

SEQ ID NO: 38803 - protein, 7 aa, synthetic construct
YFAGVRS

SEQ ID NO: 38804 - protein, 7 aa, synthetic construct
CKPYSRE

SEQ ID NO: 38805 - protein, 7 aa, synthetic construct
WTPGCKA

SEQ ID NO: 38806 - protein, 7 aa, synthetic construct
KDEWKTY

SEQ ID NO: 38807 - protein, 7 aa, synthetic construct
YVRSQMG

SEQ ID NO: 38808 - protein, 7 aa, synthetic construct
YVRSDKA

SEQ ID NO: 38809 - protein, 7 aa, synthetic construct
RTNNVYP

SEQ ID NO: 38810 - protein, 7 aa, synthetic construct
FFSGKIE

SEQ ID NO: 38811 - protein, 7 aa, synthetic construct
CKPAPGE

SEQ ID NO: 38812 - protein, 7 aa, synthetic construct
APETIRW

SEQ ID NO: 38813 - protein, 7 aa, synthetic construct
FMTGKCP

SEQ ID NO: 38814 - protein, 7 aa, synthetic construct
APPHIKW

SEQ ID NO: 38815 - protein, 7 aa, synthetic construct
DLRDRKW

SEQ ID NO: 38816 - protein, 7 aa, synthetic construct
YVKSQGS

SEQ ID NO: 38817 - protein, 7 aa, synthetic construct
YSRLHAV

SEQ ID NO: 38818 - protein, 7 aa, synthetic construct
LHRLSEY

SEQ ID NO: 38819 - protein, 7 aa, synthetic construct
YWTGVTD

SEQ ID NO: 38820 - protein, 7 aa, synthetic construct
YSRLSDV

SEQ ID NO: 38821 - protein, 7 aa, synthetic construct
RESSVRW

SEQ ID NO: 38822 - protein, 7 aa, synthetic construct
REEEVAW

SEQ ID NO: 38823 - protein, 7 aa, synthetic construct
CKEGSAW

SEQ ID NO: 38824 - protein, 7 aa, synthetic construct
SMADRSW

SEQ ID NO: 38825 - protein, 7 aa, synthetic construct
RDEFRSW

SEQ ID NO: 38826 - protein, 7 aa, synthetic construct
RDEFKVW

SEQ ID NO: 38827 - protein, 7 aa, synthetic construct
YHRLSIN

SEQ ID NO: 38828 - protein, 7 aa, synthetic construct
GSDFVRW

SEQ ID NO: 38829 - protein, 7 aa, synthetic construct
YWTGMIS

SEQ ID NO: 38830 - protein, 7 aa, synthetic construct
CRPQTPL

SEQ ID NO: 38831 - protein, 7 aa, synthetic construct
HMPDRKW

SEQ ID NO: 38832 - protein, 7 aa, synthetic construct
YSRLSPT

SEQ ID NO: 38833 - protein, 7 aa, synthetic construct
RPESVRW

SEQ ID NO: 38834 - protein, 7 aa, synthetic construct
RDEYMSW

SEQ ID NO: 38835 - protein, 7 aa, synthetic construct
RDEFRSY

SEQ ID NO: 38836 - protein, 7 aa, synthetic construct
IGGRCPP

SEQ ID NO: 38837 - protein, 7 aa, synthetic construct
DPSSVRW

SEQ ID NO: 38838 - protein, 7 aa, synthetic construct
LSKSAYN

SEQ ID NO: 38839 - protein, 7 aa, synthetic construct
WWSAVPE

SEQ ID NO: 38840 - protein, 7 aa, synthetic construct
ENASRAW

SEQ ID NO: 38841 - protein, 7 aa, synthetic construct
VSTHCTA

SEQ ID NO: 38842 - protein, 7 aa, synthetic construct
CKPPSGD

SEQ ID NO: 38843 - protein, 7 aa, synthetic construct
YHRLSAN

SEQ ID NO: 38844 - protein, 7 aa, synthetic construct
CPQKGQE

SEQ ID NO: 38845 - protein, 7 aa, synthetic construct
PLSDRTW

SEQ ID NO: 38846 - protein, 7 aa, synthetic construct
RDATSGW

SEQ ID NO: 38847 - protein, 7 aa, synthetic construct
YFTKQIN

SEQ ID NO: 38848 - protein, 7 aa, synthetic construct
HTPMCKA

SEQ ID NO: 38849 - protein, 7 aa, synthetic construct
YFTGREN

SEQ ID NO: 38850 - protein, 7 aa, synthetic construct
YHKSQNF

SEQ ID NO: 38851 - protein, 7 aa, synthetic construct
CKLPKEL

SEQ ID NO: 38852 - protein, 7 aa, synthetic construct
VSTHCAA

SEQ ID NO: 38853 - protein, 7 aa, synthetic construct
RMPDRGW

SEQ ID NO: 38854 - protein, 7 aa, synthetic construct
PYARSPL

SEQ ID NO: 38855 - protein, 7 aa, synthetic construct
TRQGDPA

SEQ ID NO: 38856 - protein, 7 aa, synthetic construct
YHRMSPD

SEQ ID NO: 38857 - protein, 7 aa, synthetic construct
DLGSSVW

SEQ ID NO: 38858 - protein, 7 aa, synthetic construct
GDEWQHF

SEQ ID NO: 38859 - protein, 7 aa, synthetic construct
GGPTMCY

SEQ ID NO: 38860 - protein, 7 aa, synthetic construct
VPGHCLV

SEQ ID NO: 38861 - protein, 7 aa, synthetic construct
PYARSIE

SEQ ID NO: 38862 - protein, 7 aa, synthetic construct
YHRLGDP

SEQ ID NO: 38863 - protein, 7 aa, synthetic construct
YSRLQSN

SEQ ID NO: 38864 - protein, 7 aa, synthetic construct
YFTGRED

SEQ ID NO: 38865 - protein, 7 aa, synthetic construct
YWQGIKD

SEQ ID NO: 38866 - protein, 7 aa, synthetic construct
YFTGVAV

SEQ ID NO: 38867 - protein, 7 aa, synthetic construct
GVEAVRW

SEQ ID NO: 38868 - protein, 7 aa, synthetic construct
SMSDRTW

SEQ ID NO: 38869 - protein, 7 aa, synthetic construct
YSRIQTD

SEQ ID NO: 38870 - protein, 7 aa, synthetic construct
GSEFSTY

SEQ ID NO: 38871 - protein, 7 aa, synthetic construct
YFSKIAA

SEQ ID NO: 38872 - protein, 7 aa, synthetic construct
RDDYVSW

SEQ ID NO: 38873 - protein, 7 aa, synthetic construct
QMKDRTW

SEQ ID NO: 38874 - protein, 7 aa, synthetic construct
YSRLQPV

SEQ ID NO: 38875 - protein, 7 aa, synthetic construct
FSRVSDN

SEQ ID NO: 38876 - protein, 7 aa, synthetic construct
MMDGTNA

SEQ ID NO: 38877 - protein, 7 aa, synthetic construct
AMADREW

SEQ ID NO: 38878 - protein, 7 aa, synthetic construct
CKQPKTE

SEQ ID NO: 38879 - protein, 7 aa, synthetic construct
FFTGYKE

SEQ ID NO: 38880 - protein, 7 aa, synthetic construct
RMEDRQW

SEQ ID NO: 38881 - protein, 7 aa, synthetic construct
LHRLGEG

SEQ ID NO: 38882 - protein, 7 aa, synthetic construct
YSRLSYD

SEQ ID NO: 38883 - protein, 7 aa, synthetic construct
VMQDRTW

SEQ ID NO: 38884 - protein, 7 aa, synthetic construct
YWTGVHD

SEQ ID NO: 38885 - protein, 7 aa, synthetic construct
YHRLSDH

SEQ ID NO: 38886 - protein, 7 aa, synthetic construct
KYDHVAW

SEQ ID NO: 38887 - protein, 7 aa, synthetic construct
WTPMCKN

SEQ ID NO: 38888 - protein, 7 aa, synthetic construct
YFSGRIQ

SEQ ID NO: 38889 - protein, 7 aa, synthetic construct
YFSGIHL

SEQ ID NO: 38890 - protein, 7 aa, synthetic construct
RTREVYP

SEQ ID NO: 38891 - protein, 7 aa, synthetic construct
YFSGHHE

SEQ ID NO: 38892 - protein, 7 aa, synthetic construct
YFTGFLE

SEQ ID NO: 38893 - protein, 7 aa, synthetic construct
CKPDEVR

SEQ ID NO: 38894 - protein, 7 aa, synthetic construct
LARTGCD

SEQ ID NO: 38895 - protein, 7 aa, synthetic construct
CAGYLHE

SEQ ID NO: 38896 - protein, 7 aa, synthetic construct
CGGGRLP

SEQ ID NO: 38897 - protein, 7 aa, synthetic construct
YYSGITA

SEQ ID NO: 38898 - protein, 7 aa, synthetic construct
RAYDAFP

SEQ ID NO: 38899 - protein, 7 aa, synthetic construct
RGEFSTW

SEQ ID NO: 38900 - protein, 7 aa, synthetic construct
YFSQIKE

SEQ ID NO: 38901 - protein, 7 aa, synthetic construct
YFTGTLQ

SEQ ID NO: 38902 - protein, 7 aa, synthetic construct
LDGTSRW

SEQ ID NO: 38903 - protein, 7 aa, synthetic construct
YESTNGR

SEQ ID NO: 38904 - protein, 7 aa, synthetic construct
YLKSQGY

SEQ ID NO: 38905 - protein, 7 aa, synthetic construct
YFAGILA

SEQ ID NO: 38906 - protein, 7 aa, synthetic construct
YFSGKRE

SEQ ID NO: 38907 - protein, 7 aa, synthetic construct
YFHGQID

SEQ ID NO: 38908 - protein, 7 aa, synthetic construct
KLTDRTW

SEQ ID NO: 38909 - protein, 7 aa, synthetic construct
CKPPSPM

SEQ ID NO: 38910 - protein, 7 aa, synthetic construct
YFTGVLP

SEQ ID NO: 38911 - protein, 7 aa, synthetic construct
TWEGDAA

SEQ ID NO: 38912 - protein, 7 aa, synthetic construct
PLSSQSW

SEQ ID NO: 38913 - protein, 7 aa, synthetic construct
YSRLGPV

SEQ ID NO: 38914 - protein, 7 aa, synthetic construct
YSRLQER

SEQ ID NO: 38915 - protein, 7 aa, synthetic construct
RLESQVW

SEQ ID NO: 38916 - protein, 7 aa, synthetic construct
CKPEMLR

SEQ ID NO: 38917 - protein, 7 aa, synthetic construct
YSKWNVN

SEQ ID NO: 38918 - protein, 7 aa, synthetic construct
CKPAQGS

SEQ ID NO: 38919 - protein, 7 aa, synthetic construct
YGATKCD

SEQ ID NO: 38920 - protein, 7 aa, synthetic construct
YFSGQQD

SEQ ID NO: 38921 - protein, 7 aa, synthetic construct
WCRSQAG

SEQ ID NO: 38922 - protein, 7 aa, synthetic construct
GCRHGDM

SEQ ID NO: 38923 - protein, 7 aa, synthetic construct
CMPPSKE

SEQ ID NO: 38924 - protein, 7 aa, synthetic construct
KGLEGMD

SEQ ID NO: 38925 - protein, 7 aa, synthetic construct
TCIAPDR

SEQ ID NO: 38926 - protein, 7 aa, synthetic construct
YSRIQVD

SEQ ID NO: 38927 - protein, 7 aa, synthetic construct
YWSKVME

SEQ ID NO: 38928 - protein, 7 aa, synthetic construct
GDEWIHF

SEQ ID NO: 38929 - protein, 7 aa, synthetic construct
SDFTCRE

SEQ ID NO: 38930 - protein, 7 aa, synthetic construct
CKDEYRV

SEQ ID NO: 38931 - protein, 7 aa, synthetic construct
PMESKKW

SEQ ID NO: 38932 - protein, 7 aa, synthetic construct
CTSRTGH

SEQ ID NO: 38933 - protein, 7 aa, synthetic construct
ARSTNGI

SEQ ID NO: 38934 - protein, 7 aa, synthetic construct
VMSDRRW

SEQ ID NO: 38935 - protein, 7 aa, synthetic construct
YHKLNIT

SEQ ID NO: 38936 - protein, 7 aa, synthetic construct
FWSGIKE

SEQ ID NO: 38937 - protein, 7 aa, synthetic construct
RQSTNGI

SEQ ID NO: 38938 - protein, 7 aa, synthetic construct
YYTGILE

SEQ ID NO: 38939 - protein, 7 aa, synthetic construct
YFTGRLV

SEQ ID NO: 38940 - protein, 7 aa, synthetic construct
YYTGKVS

SEQ ID NO: 38941 - protein, 7 aa, synthetic construct
YFSGVTN

SEQ ID NO: 38942 - protein, 7 aa, synthetic construct
CKPQSGW

SEQ ID NO: 38943 - protein, 7 aa, synthetic construct
YSRIQAD

SEQ ID NO: 38944 - protein, 7 aa, synthetic construct
QDGYSKY

SEQ ID NO: 38945 - protein, 7 aa, synthetic construct
YSKLSDL

SEQ ID NO: 38946 - protein, 7 aa, synthetic construct
YYTGRVD

SEQ ID NO: 38947 - protein, 7 aa, synthetic construct
REEFTTW

SEQ ID NO: 38948 - protein, 7 aa, synthetic construct
CKRQSEW

SEQ ID NO: 38949 - protein, 7 aa, synthetic construct
GCGTKPG

SEQ ID NO: 38950 - protein, 7 aa, synthetic construct
YYTGVKN

SEQ ID NO: 38951 - protein, 7 aa, synthetic construct
YYTGVMA

SEQ ID NO: 38952 - protein, 7 aa, synthetic construct
YSTNCKS

SEQ ID NO: 38953 - protein, 7 aa, synthetic construct
YFSGVTR

SEQ ID NO: 38954 - protein, 7 aa, synthetic construct
YSRLNGL

SEQ ID NO: 38955 - protein, 7 aa, synthetic construct
ELSSIKW

SEQ ID NO: 38956 - protein, 7 aa, synthetic construct
PMSVSKW

SEQ ID NO: 38957 - protein, 7 aa, synthetic construct
YHRLGGD

SEQ ID NO: 38958 - protein, 7 aa, synthetic construct
YFSGKSS

SEQ ID NO: 38959 - protein, 7 aa, synthetic construct
CAPDYRQ

SEQ ID NO: 38960 - protein, 7 aa, synthetic construct
RDEFEHW

SEQ ID NO: 38961 - protein, 7 aa, synthetic construct
KDGYSLY

SEQ ID NO: 38962 - protein, 7 aa, synthetic construct
IAYDAYP

SEQ ID NO: 38963 - protein, 7 aa, synthetic construct
DMGASSW

SEQ ID NO: 38964 - protein, 7 aa, synthetic construct
ILESRDW

SEQ ID NO: 38965 - protein, 7 aa, synthetic construct
SMQDRFW

SEQ ID NO: 38966 - protein, 7 aa, synthetic construct
RDEFRTY

SEQ ID NO: 38967 - protein, 7 aa, synthetic construct
YSRIGPH

SEQ ID NO: 38968 - protein, 7 aa, synthetic construct
IMSERVW

SEQ ID NO: 38969 - protein, 7 aa, synthetic construct
YAKQSRN

SEQ ID NO: 38970 - protein, 7 aa, synthetic construct
CKPDALR

SEQ ID NO: 38971 - protein, 7 aa, synthetic construct
YSRIGCN

SEQ ID NO: 38972 - protein, 7 aa, synthetic construct
VMEDRNW

SEQ ID NO: 38973 - protein, 7 aa, synthetic construct
CKKDEAV

SEQ ID NO: 38974 - protein, 7 aa, synthetic construct
YWTGTHE

SEQ ID NO: 38975 - protein, 7 aa, synthetic construct
CKEGTRG

SEQ ID NO: 38976 - protein, 7 aa, synthetic construct
GCGTKVG

SEQ ID NO: 38977 - protein, 7 aa, synthetic construct
GSDFSRW

SEQ ID NO: 38978 - protein, 7 aa, synthetic construct
CKPLMSP

SEQ ID NO: 38979 - protein, 7 aa, synthetic construct
YSRIQPM

SEQ ID NO: 38980 - protein, 7 aa, synthetic construct
YHRLGQN

SEQ ID NO: 38981 - protein, 7 aa, synthetic construct
YSRIQAN

SEQ ID NO: 38982 - protein, 7 aa, synthetic construct
NGINGRW

SEQ ID NO: 38983 - protein, 7 aa, synthetic construct
FFTGRLE

SEQ ID NO: 38984 - protein, 7 aa, synthetic construct
RYEPKCP

SEQ ID NO: 38985 - protein, 7 aa, synthetic construct
YYSGVIA

SEQ ID NO: 38986 - protein, 7 aa, synthetic construct
YFTGMAN

SEQ ID NO: 38987 - protein, 7 aa, synthetic construct
KSEFRSF

SEQ ID NO: 38988 - protein, 7 aa, synthetic construct
CRPGEPY

SEQ ID NO: 38989 - protein, 7 aa, synthetic construct
YLKSPCA

SEQ ID NO: 38990 - protein, 7 aa, synthetic construct
GPETVRW

SEQ ID NO: 38991 - protein, 7 aa, synthetic construct
YWAGIVD

SEQ ID NO: 38992 - protein, 7 aa, synthetic construct
LCKGSLD

SEQ ID NO: 38993 - protein, 7 aa, synthetic construct
RSDFTTY

SEQ ID NO: 38994 - protein, 7 aa, synthetic construct
YFSRIQE

SEQ ID NO: 38995 - protein, 7 aa, synthetic construct
GCRHPDI

SEQ ID NO: 38996 - protein, 7 aa, synthetic construct
CRPDVKT

SEQ ID NO: 38997 - protein, 7 aa, synthetic construct
GCRTGDI

SEQ ID NO: 38998 - protein, 7 aa, synthetic construct
YVKSQLV

SEQ ID NO: 38999 - protein, 7 aa, synthetic construct
WFTGRVD

SEQ ID NO: 39000 - protein, 7 aa, synthetic construct
YVKSDRV

SEQ ID NO: 39001 - protein, 7 aa, synthetic construct
YSRILPN

SEQ ID NO: 39002 - protein, 7 aa, synthetic construct
KEEYCKP

SEQ ID NO: 39003 - protein, 7 aa, synthetic construct
FFSGKID

SEQ ID NO: 39004 - protein, 7 aa, synthetic construct
YSKIGFD

SEQ ID NO: 39005 - protein, 7 aa, synthetic construct
YYTGKQD

SEQ ID NO: 39006 - protein, 7 aa, synthetic construct
MWDGTDA

SEQ ID NO: 39007 - protein, 7 aa, synthetic construct
KDDWTPY

SEQ ID NO: 39008 - protein, 7 aa, synthetic construct
YFHGVTE

SEQ ID NO: 39009 - protein, 7 aa, synthetic construct
IPYEGIG

SEQ ID NO: 39010 - protein, 7 aa, synthetic construct
YFSGKND

SEQ ID NO: 39011 - protein, 7 aa, synthetic construct
YYTGIQA

SEQ ID NO: 39012 - protein, 7 aa, synthetic construct
YHKLQYG

SEQ ID NO: 39013 - protein, 7 aa, synthetic construct
YWQGIKE

SEQ ID NO: 39014 - protein, 7 aa, synthetic construct
YWEGVRA

SEQ ID NO: 39015 - protein, 7 aa, synthetic construct
CKPVCCD

SEQ ID NO: 39016 - protein, 7 aa, synthetic construct
YFHGKMD

SEQ ID NO: 39017 - protein, 7 aa, synthetic construct
YFSGVMP

SEQ ID NO: 39018 - protein, 7 aa, synthetic construct
RTGTSCL

SEQ ID NO: 39019 - protein, 7 aa, synthetic construct
YHRLSDF

SEQ ID NO: 39020 - protein, 7 aa, synthetic construct
YFAGRYD

SEQ ID NO: 39021 - protein, 7 aa, synthetic construct
PYARSLD

SEQ ID NO: 39022 - protein, 7 aa, synthetic construct
YSRLQMN

SEQ ID NO: 39023 - protein, 7 aa, synthetic construct
YWTGMTD

SEQ ID NO: 39024 - protein, 7 aa, synthetic construct
MFDGTVA

SEQ ID NO: 39025 - protein, 7 aa, synthetic construct
CKLSSPS

SEQ ID NO: 39026 - protein, 7 aa, synthetic construct
CKANTKD

SEQ ID NO: 39027 - protein, 7 aa, synthetic construct
YWSGKLE

SEQ ID NO: 39028 - protein, 7 aa, synthetic construct
DLRLADW

SEQ ID NO: 39029 - protein, 7 aa, synthetic construct
YYSGIVK

SEQ ID NO: 39030 - protein, 7 aa, synthetic construct
VESDHGR

SEQ ID NO: 39031 - protein, 7 aa, synthetic construct
KCRPCSE

SEQ ID NO: 39032 - protein, 7 aa, synthetic construct
CKPPPKI

SEQ ID NO: 39033 - protein, 7 aa, synthetic construct
YFSGIQG

SEQ ID NO: 39034 - protein, 7 aa, synthetic construct
YRPGCIG

SEQ ID NO: 39035 - protein, 7 aa, synthetic construct
YTRLSDN

SEQ ID NO: 39036 - protein, 7 aa, synthetic construct
TSEFKVY

SEQ ID NO: 39037 - protein, 7 aa, synthetic construct
YFSGRPE

SEQ ID NO: 39038 - protein, 7 aa, synthetic construct
FFSGRIE

SEQ ID NO: 39039 - protein, 7 aa, synthetic construct
YWSGLVE

SEQ ID NO: 39040 - protein, 7 aa, synthetic construct
YFTRVLE

SEQ ID NO: 39041 - protein, 7 aa, synthetic construct
KDDWTSY

SEQ ID NO: 39042 - protein, 7 aa, synthetic construct
GGEFKCF

SEQ ID NO: 39043 - protein, 7 aa, synthetic construct
RDDWTVF

SEQ ID NO: 39044 - protein, 7 aa, synthetic construct
YFTGQTM

SEQ ID NO: 39045 - protein, 7 aa, synthetic construct
FFTGYID

SEQ ID NO: 39046 - protein, 7 aa, synthetic construct
YSRLSID

SEQ ID NO: 39047 - protein, 7 aa, synthetic construct
YFTGVQG

SEQ ID NO: 39048 - protein, 7 aa, synthetic construct
KLGGSCG

SEQ ID NO: 39049 - protein, 7 aa, synthetic construct
DDGFSKW

SEQ ID NO: 39050 - protein, 7 aa, synthetic construct
FFSGKVE

SEQ ID NO: 39051 - protein, 7 aa, synthetic construct
YFAGTHD

SEQ ID NO: 39052 - protein, 7 aa, synthetic construct
WTPMCKQ

SEQ ID NO: 39053 - protein, 7 aa, synthetic construct
CAPYHHE

SEQ ID NO: 39054 - protein, 7 aa, synthetic construct
YHAAGPD

SEQ ID NO: 39055 - protein, 7 aa, synthetic construct
WWSGVQE

SEQ ID NO: 39056 - protein, 7 aa, synthetic construct
WPNGVAG

SEQ ID NO: 39057 - protein, 7 aa, synthetic construct
CKPPTAP

SEQ ID NO: 39058 - protein, 7 aa, synthetic construct
KLDYLGI

SEQ ID NO: 39059 - protein, 7 aa, synthetic construct
YFSGTHN

SEQ ID NO: 39060 - protein, 7 aa, synthetic construct
DMGSANW

SEQ ID NO: 39061 - protein, 7 aa, synthetic construct
RDGTSIW

SEQ ID NO: 39062 - protein, 7 aa, synthetic construct
QSPGCKD

SEQ ID NO: 39063 - protein, 7 aa, synthetic construct
KDDWSSW

SEQ ID NO: 39064 - protein, 7 aa, synthetic construct
YYSGIHA

SEQ ID NO: 39065 - protein, 7 aa, synthetic construct
RNEFCQP

SEQ ID NO: 39066 - protein, 7 aa, synthetic construct
WFSGKIE

SEQ ID NO: 39067 - protein, 7 aa, synthetic construct
YSRVSDN

SEQ ID NO: 39068 - protein, 7 aa, synthetic construct
YYTGKCD

SEQ ID NO: 39069 - protein, 7 aa, synthetic construct
FWSGVKD

SEQ ID NO: 39070 - protein, 7 aa, synthetic construct
YVRSQML

SEQ ID NO: 39071 - protein, 7 aa, synthetic construct
CGRAGRD

SEQ ID NO: 39072 - protein, 7 aa, synthetic construct
VMEARGW

SEQ ID NO: 39073 - protein, 7 aa, synthetic construct
LHRLHTD

SEQ ID NO: 39074 - protein, 7 aa, synthetic construct
DLRDRIW

SEQ ID NO: 39075 - protein, 7 aa, synthetic construct
YFSGVQV

SEQ ID NO: 39076 - protein, 7 aa, synthetic construct
YSRRSDN

SEQ ID NO: 39077 - protein, 7 aa, synthetic construct
IMEDRVW

SEQ ID NO: 39078 - protein, 7 aa, synthetic construct
YTKLDYN

SEQ ID NO: 39079 - protein, 7 aa, synthetic construct
CMSGPRP

SEQ ID NO: 39080 - protein, 7 aa, synthetic construct
GDGQSRW

SEQ ID NO: 39081 - protein, 7 aa, synthetic construct
RDDFTGY

SEQ ID NO: 39082 - protein, 7 aa, synthetic construct
YFAGVKD

SEQ ID NO: 39083 - protein, 7 aa, synthetic construct
GSMTSTW

SEQ ID NO: 39084 - protein, 7 aa, synthetic construct
YYTGHVN

SEQ ID NO: 39085 - protein, 7 aa, synthetic construct
YYSGVKS

SEQ ID NO: 39086 - protein, 7 aa, synthetic construct
YWHGVVD

SEQ ID NO: 39087 - protein, 7 aa, synthetic construct
YFTGVHP

SEQ ID NO: 39088 - protein, 7 aa, synthetic construct
QNEFTMY

SEQ ID NO: 39089 - protein, 7 aa, synthetic construct
YFSGIPM

SEQ ID NO: 39090 - protein, 7 aa, synthetic construct
QHPICKP

SEQ ID NO: 39091 - protein, 7 aa, synthetic construct
CTPKTGH

SEQ ID NO: 39092 - protein, 7 aa, synthetic construct
RDEFMHY

SEQ ID NO: 39093 - protein, 7 aa, synthetic construct
YYTGVKM

SEQ ID NO: 39094 - protein, 7 aa, synthetic construct
RSEFTGY

SEQ ID NO: 39095 - protein, 7 aa, synthetic construct
VSTHCIA

SEQ ID NO: 39096 - protein, 7 aa, synthetic construct
YWHGVPE

SEQ ID NO: 39097 - protein, 7 aa, synthetic construct
CMSTSRS

SEQ ID NO: 39098 - protein, 7 aa, synthetic construct
YVKSQMI

SEQ ID NO: 39099 - protein, 7 aa, synthetic construct
QRPCQPG

SEQ ID NO: 39100 - protein, 7 aa, synthetic construct
YEPGCGE

SEQ ID NO: 39101 - protein, 7 aa, synthetic construct
CKPDSFR

SEQ ID NO: 39102 - protein, 7 aa, synthetic construct
YFSGTRA

SEQ ID NO: 39103 - protein, 7 aa, synthetic construct
KDEFTIY

SEQ ID NO: 39104 - protein, 7 aa, synthetic construct
CNIPMTA

SEQ ID NO: 39105 - protein, 7 aa, synthetic construct
YWDGTPA

SEQ ID NO: 39106 - protein, 7 aa, synthetic construct
CKGESAI

SEQ ID NO: 39107 - protein, 7 aa, synthetic construct
YFHGRVD

SEQ ID NO: 39108 - protein, 7 aa, synthetic construct
YWSGKVA

SEQ ID NO: 39109 - protein, 7 aa, synthetic construct
YWTGTID

SEQ ID NO: 39110 - protein, 7 aa, synthetic construct
CKPDCCP

SEQ ID NO: 39111 - protein, 7 aa, synthetic construct
YFAGKQD

SEQ ID NO: 39112 - protein, 7 aa, synthetic construct
YYSGIIS

SEQ ID NO: 39113 - protein, 7 aa, synthetic construct
RGEFCGG

SEQ ID NO: 39114 - protein, 7 aa, synthetic construct
YVRNDPN

SEQ ID NO: 39115 - protein, 7 aa, synthetic construct
VGEARSW

SEQ ID NO: 39116 - protein, 7 aa, synthetic construct
VSEFRTY

SEQ ID NO: 39117 - protein, 7 aa, synthetic construct
WEPMCKA

SEQ ID NO: 39118 - protein, 7 aa, synthetic construct
CKPPSPI

SEQ ID NO: 39119 - protein, 7 aa, synthetic construct
ACKPQMG

SEQ ID NO: 39120 - protein, 7 aa, synthetic construct
GNGTKCG

SEQ ID NO: 39121 - protein, 7 aa, synthetic construct
GGDGSSW

SEQ ID NO: 39122 - protein, 7 aa, synthetic construct
CLGKCKP

SEQ ID NO: 39123 - protein, 7 aa, synthetic construct
LCRACSE

SEQ ID NO: 39124 - protein, 7 aa, synthetic construct
GIANTMW

SEQ ID NO: 39125 - protein, 7 aa, synthetic construct
FFTGQRD

SEQ ID NO: 39126 - protein, 7 aa, synthetic construct
YFSGRTD

SEQ ID NO: 39127 - protein, 7 aa, synthetic construct
YHKSQQY

SEQ ID NO: 39128 - protein, 7 aa, synthetic construct
IPGHKCA

SEQ ID NO: 39129 - protein, 7 aa, synthetic construct
WSRIGPN

SEQ ID NO: 39130 - protein, 7 aa, synthetic construct
WDGSCKA

SEQ ID NO: 39131 - protein, 7 aa, synthetic construct
CKPFTRE

SEQ ID NO: 39132 - protein, 7 aa, synthetic construct
DYAYSRE

SEQ ID NO: 39133 - protein, 7 aa, synthetic construct
IMGDRTW

SEQ ID NO: 39134 - protein, 7 aa, synthetic construct
SLADRKW

SEQ ID NO: 39135 - protein, 7 aa, synthetic construct
FCSTNGV

SEQ ID NO: 39136 - protein, 7 aa, synthetic construct
FHRLSTN

SEQ ID NO: 39137 - protein, 7 aa, synthetic construct
IMQDRAW

SEQ ID NO: 39138 - protein, 7 aa, synthetic construct
DMASRMW

SEQ ID NO: 39139 - protein, 7 aa, synthetic construct
RTEFEGY

SEQ ID NO: 39140 - protein, 7 aa, synthetic construct
FFSGVKD

SEQ ID NO: 39141 - protein, 7 aa, synthetic construct
YWSGLLD

SEQ ID NO: 39142 - protein, 7 aa, synthetic construct
RDYDAFP

SEQ ID NO: 39143 - protein, 7 aa, synthetic construct
LSKVGPD

SEQ ID NO: 39144 - protein, 7 aa, synthetic construct
YFSGMRS

SEQ ID NO: 39145 - protein, 7 aa, synthetic construct
RGESHGW

SEQ ID NO: 39146 - protein, 7 aa, synthetic construct
WYSGIKE

SEQ ID NO: 39147 - protein, 7 aa, synthetic construct
TDDWSSY

SEQ ID NO: 39148 - protein, 7 aa, synthetic construct
CMPCTPC

SEQ ID NO: 39149 - protein, 7 aa, synthetic construct
CGPGCCE

SEQ ID NO: 39150 - protein, 7 aa, synthetic construct
ADGVSKW

SEQ ID NO: 39151 - protein, 7 aa, synthetic construct
KDGYSVW

SEQ ID NO: 39152 - protein, 7 aa, synthetic construct
RTYDAFA

SEQ ID NO: 39153 - protein, 7 aa, synthetic construct
YFSGVSM

SEQ ID NO: 39154 - protein, 7 aa, synthetic construct
GCRPQAG

SEQ ID NO: 39155 - protein, 7 aa, synthetic construct
FWSGIVE

SEQ ID NO: 39156 - protein, 7 aa, synthetic construct
PYARSVD

SEQ ID NO: 39157 - protein, 7 aa, synthetic construct
YFSGVHQ

SEQ ID NO: 39158 - protein, 7 aa, synthetic construct
YHRLSEM

SEQ ID NO: 39159 - protein, 7 aa, synthetic construct
YWSGLKE

SEQ ID NO: 39160 - protein, 7 aa, synthetic construct
RTFDSYA

SEQ ID NO: 39161 - protein, 7 aa, synthetic construct
CKPRMLE

SEQ ID NO: 39162 - protein, 7 aa, synthetic construct
YFTGYTE

SEQ ID NO: 39163 - protein, 7 aa, synthetic construct
LWDGTMS

SEQ ID NO: 39164 - protein, 7 aa, synthetic construct
CKPPSDM

SEQ ID NO: 39165 - protein, 7 aa, synthetic construct
LCNPCLT

SEQ ID NO: 39166 - protein, 7 aa, synthetic construct
WYSGIRE

SEQ ID NO: 39167 - protein, 7 aa, synthetic construct
LYDGDGP

SEQ ID NO: 39168 - protein, 7 aa, synthetic construct
LLQSTTW

SEQ ID NO: 39169 - protein, 7 aa, synthetic construct
YCKDNRP

SEQ ID NO: 39170 - protein, 7 aa, synthetic construct
LNDYVTY

SEQ ID NO: 39171 - protein, 7 aa, synthetic construct
YARTGWD

SEQ ID NO: 39172 - protein, 7 aa, synthetic construct
QDEYLSW

SEQ ID NO: 39173 - protein, 7 aa, synthetic construct
DMRDRMW

SEQ ID NO: 39174 - protein, 7 aa, synthetic construct
GSGTSSW

SEQ ID NO: 39175 - protein, 7 aa, synthetic construct
IMESQSW

SEQ ID NO: 39176 - protein, 7 aa, synthetic construct
YWAGKIE

SEQ ID NO: 39177 - protein, 7 aa, synthetic construct
YWSGTVD

SEQ ID NO: 39178 - protein, 7 aa, synthetic construct
YWSKIAE

SEQ ID NO: 39179 - protein, 7 aa, synthetic construct
RDSTHGI

SEQ ID NO: 39180 - protein, 7 aa, synthetic construct
YYTGQVS

SEQ ID NO: 39181 - protein, 7 aa, synthetic construct
FHRLSDD

SEQ ID NO: 39182 - protein, 7 aa, synthetic construct
YMKDAFP

SEQ ID NO: 39183 - protein, 7 aa, synthetic construct
KDDWNSW

SEQ ID NO: 39184 - protein, 7 aa, synthetic construct
WFTGKVD

SEQ ID NO: 39185 - protein, 7 aa, synthetic construct
YSRIGPM

SEQ ID NO: 39186 - protein, 7 aa, synthetic construct
GDEWVGY

SEQ ID NO: 39187 - protein, 7 aa, synthetic construct
CKPPMAP

SEQ ID NO: 39188 - protein, 7 aa, synthetic construct
RDADVFP

SEQ ID NO: 39189 - protein, 7 aa, synthetic construct
WVKSQQH

SEQ ID NO: 39190 - protein, 7 aa, synthetic construct
YWTGVGA

SEQ ID NO: 39191 - protein, 7 aa, synthetic construct
YHARQIN

SEQ ID NO: 39192 - protein, 7 aa, synthetic construct
YWSGKAA

SEQ ID NO: 39193 - protein, 7 aa, synthetic construct
RQSTNGV

SEQ ID NO: 39194 - protein, 7 aa, synthetic construct
YWSAVVA

SEQ ID NO: 39195 - protein, 7 aa, synthetic construct
AMQDRSW

SEQ ID NO: 39196 - protein, 7 aa, synthetic construct
CAPYLRE

SEQ ID NO: 39197 - protein, 7 aa, synthetic construct
RSDFTSY

SEQ ID NO: 39198 - protein, 7 aa, synthetic construct
FFTGIQA

SEQ ID NO: 39199 - protein, 7 aa, synthetic construct
RDDYVYY

SEQ ID NO: 39200 - protein, 7 aa, synthetic construct
CHKKEEG

SEQ ID NO: 39201 - protein, 7 aa, synthetic construct
SMASVKW

SEQ ID NO: 39202 - protein, 7 aa, synthetic construct
YPGKTCS

SEQ ID NO: 39203 - protein, 7 aa, synthetic construct
SLESRDW

SEQ ID NO: 39204 - protein, 7 aa, synthetic construct
VPSSVKW

SEQ ID NO: 39205 - protein, 7 aa, synthetic construct
YFSGQHS

SEQ ID NO: 39206 - protein, 7 aa, synthetic construct
CSVVTGS

SEQ ID NO: 39207 - protein, 7 aa, synthetic construct
TWMGDNA

SEQ ID NO: 39208 - protein, 7 aa, synthetic construct
YWQGIVD

SEQ ID NO: 39209 - protein, 7 aa, synthetic construct
YFTGRPM

SEQ ID NO: 39210 - protein, 7 aa, synthetic construct
RDGTSQW

SEQ ID NO: 39211 - protein, 7 aa, synthetic construct
LHRLHLD

SEQ ID NO: 39212 - protein, 7 aa, synthetic construct
YYSGRIE

SEQ ID NO: 39213 - protein, 7 aa, synthetic construct
GCRHGPI

SEQ ID NO: 39214 - protein, 7 aa, synthetic construct
IAERGCA

SEQ ID NO: 39215 - protein, 7 aa, synthetic construct
CKPKQVD

SEQ ID NO: 39216 - protein, 7 aa, synthetic construct
YFQGRID

SEQ ID NO: 39217 - protein, 7 aa, synthetic construct
MGGTSCL

SEQ ID NO: 39218 - protein, 7 aa, synthetic construct
YWSGLHA

SEQ ID NO: 39219 - protein, 7 aa, synthetic construct
KCDIKPA

SEQ ID NO: 39220 - protein, 7 aa, synthetic construct
VMDGLRW

SEQ ID NO: 39221 - protein, 7 aa, synthetic construct
YFTKQVD

SEQ ID NO: 39222 - protein, 7 aa, synthetic construct
YFSGVTG

SEQ ID NO: 39223 - protein, 7 aa, synthetic construct
SSGTSRW

SEQ ID NO: 39224 - protein, 7 aa, synthetic construct
CKSQSSQ

SEQ ID NO: 39225 - protein, 7 aa, synthetic construct
RSEFTSY

SEQ ID NO: 39226 - protein, 7 aa, synthetic construct
YYSGRVE

SEQ ID NO: 39227 - protein, 7 aa, synthetic construct
CRDDKRW

SEQ ID NO: 39228 - protein, 7 aa, synthetic construct
CKGQGPS

SEQ ID NO: 39229 - protein, 7 aa, synthetic construct
IMSDREW

SEQ ID NO: 39230 - protein, 7 aa, synthetic construct
YFSGTHS

SEQ ID NO: 39231 - protein, 7 aa, synthetic construct
CRMDSVP

SEQ ID NO: 39232 - protein, 7 aa, synthetic construct
YVRSDTF

SEQ ID NO: 39233 - protein, 7 aa, synthetic construct
YHRLGDS

SEQ ID NO: 39234 - protein, 7 aa, synthetic construct
CKPSPGM

SEQ ID NO: 39235 - protein, 7 aa, synthetic construct
YSRIGEG

SEQ ID NO: 39236 - protein, 7 aa, synthetic construct
CKPQTIG

SEQ ID NO: 39237 - protein, 7 aa, synthetic construct
YFSGTNA

SEQ ID NO: 39238 - protein, 7 aa, synthetic construct
CCKDECP

SEQ ID NO: 39239 - protein, 7 aa, synthetic construct
RDGESYW

SEQ ID NO: 39240 - protein, 7 aa, synthetic construct
YSRAGDG

SEQ ID NO: 39241 - protein, 7 aa, synthetic construct
RPECVTG

SEQ ID NO: 39242 - protein, 7 aa, synthetic construct
NDGRSLW

SEQ ID NO: 39243 - protein, 7 aa, synthetic construct
YTKSGPS

SEQ ID NO: 39244 - protein, 7 aa, synthetic construct
CKKACGA

SEQ ID NO: 39245 - protein, 7 aa, synthetic construct
CKPYLHE

SEQ ID NO: 39246 - protein, 7 aa, synthetic construct
VAGAGCG

SEQ ID NO: 39247 - protein, 7 aa, synthetic construct
VPERCPK

SEQ ID NO: 39248 - protein, 7 aa, synthetic construct
YWSGLKD

SEQ ID NO: 39249 - protein, 7 aa, synthetic construct
RDITVFP

SEQ ID NO: 39250 - protein, 7 aa, synthetic construct
YFSGQIV

SEQ ID NO: 39251 - protein, 7 aa, synthetic construct
GGIGSAW

SEQ ID NO: 39252 - protein, 7 aa, synthetic construct
YWTGMPD

SEQ ID NO: 39253 - protein, 7 aa, synthetic construct
CKSNTYD

SEQ ID NO: 39254 - protein, 7 aa, synthetic construct
FHRLLLD

SEQ ID NO: 39255 - protein, 7 aa, synthetic construct
YWTGKHE

SEQ ID NO: 39256 - protein, 7 aa, synthetic construct
LPGVKCP

SEQ ID NO: 39257 - protein, 7 aa, synthetic construct
YFTGAYD

SEQ ID NO: 39258 - protein, 7 aa, synthetic construct
YSKCNVN

SEQ ID NO: 39259 - protein, 7 aa, synthetic construct
AMPDRGW

SEQ ID NO: 39260 - protein, 7 aa, synthetic construct
YAKTSLN

SEQ ID NO: 39261 - protein, 7 aa, synthetic construct
KDGVSKW

SEQ ID NO: 39262 - protein, 7 aa, synthetic construct
KDDFTRY

SEQ ID NO: 39263 - protein, 7 aa, synthetic construct
RTYDTFP

SEQ ID NO: 39264 - protein, 7 aa, synthetic construct
YFSKVQA

SEQ ID NO: 39265 - protein, 7 aa, synthetic construct
YSRLSDN

SEQ ID NO: 39266 - protein, 7 aa, synthetic construct
REEGVGW

SEQ ID NO: 39267 - protein, 7 aa, synthetic construct
RDDYSSY

SEQ ID NO: 39268 - protein, 7 aa, synthetic construct
YFTGMQD

SEQ ID NO: 39269 - protein, 7 aa, synthetic construct
CRPRTIE

SEQ ID NO: 39270 - protein, 7 aa, synthetic construct
IPHKGIG

SEQ ID NO: 39271 - protein, 7 aa, synthetic construct
KDDWTTY

SEQ ID NO: 39272 - protein, 7 aa, synthetic construct
DPSSRAW

SEQ ID NO: 39273 - protein, 7 aa, synthetic construct
YVRHDPM

SEQ ID NO: 39274 - protein, 7 aa, synthetic construct
YFQGVKS

SEQ ID NO: 39275 - protein, 7 aa, synthetic construct
WVRSDIK

SEQ ID NO: 39276 - protein, 7 aa, synthetic construct
YFSGVSH

SEQ ID NO: 39277 - protein, 7 aa, synthetic construct
CRIESRA

SEQ ID NO: 39278 - protein, 7 aa, synthetic construct
YYTGRVS

SEQ ID NO: 39279 - protein, 7 aa, synthetic construct
CQAKLEV

SEQ ID NO: 39280 - protein, 7 aa, synthetic construct
REDFTMW

SEQ ID NO: 39281 - protein, 7 aa, synthetic construct
CMKRPEV

SEQ ID NO: 39282 - protein, 7 aa, synthetic construct
YFSGEHD

SEQ ID NO: 39283 - protein, 7 aa, synthetic construct
YWTGLKD

SEQ ID NO: 39284 - protein, 7 aa, synthetic construct
RVGGDCP

SEQ ID NO: 39285 - protein, 7 aa, synthetic construct
QDGYSSW

SEQ ID NO: 39286 - protein, 7 aa, synthetic construct
EPESRDW

SEQ ID NO: 39287 - protein, 7 aa, synthetic construct
MTGTSCG

SEQ ID NO: 39288 - protein, 7 aa, synthetic construct
YHRLGDT

SEQ ID NO: 39289 - protein, 7 aa, synthetic construct
YWTGMQA

SEQ ID NO: 39290 - protein, 7 aa, synthetic construct
GSENVRW

SEQ ID NO: 39291 - protein, 7 aa, synthetic construct
YFTGQHN

SEQ ID NO: 39292 - protein, 7 aa, synthetic construct
CDGSFKA

SEQ ID NO: 39293 - protein, 7 aa, synthetic construct
CKPLPSG

SEQ ID NO: 39294 - protein, 7 aa, synthetic construct
YTRVSDN

SEQ ID NO: 39295 - protein, 7 aa, synthetic construct
REEYTAY

SEQ ID NO: 39296 - protein, 7 aa, synthetic construct
FFSGIRD

SEQ ID NO: 39297 - protein, 7 aa, synthetic construct
SPETRCP

SEQ ID NO: 39298 - protein, 7 aa, synthetic construct
KDDFTGY

SEQ ID NO: 39299 - protein, 7 aa, synthetic construct
GCGTKFG

SEQ ID NO: 39300 - protein, 7 aa, synthetic construct
RDGTSTW

SEQ ID NO: 39301 - protein, 7 aa, synthetic construct
CAVYLHE

SEQ ID NO: 39302 - protein, 7 aa, synthetic construct
RDYEVYP

SEQ ID NO: 39303 - protein, 7 aa, synthetic construct
RNFDAYP

SEQ ID NO: 39304 - protein, 7 aa, synthetic construct
IMGDRKW

SEQ ID NO: 39305 - protein, 7 aa, synthetic construct
RSSDAYP

SEQ ID NO: 39306 - protein, 7 aa, synthetic construct
YWTGKPD

SEQ ID NO: 39307 - protein, 7 aa, synthetic construct
YSKLHTH

SEQ ID NO: 39308 - protein, 7 aa, synthetic construct
FSRLSPV

SEQ ID NO: 39309 - protein, 7 aa, synthetic construct
YFSGRPD

SEQ ID NO: 39310 - protein, 7 aa, synthetic construct
YFTGRTQ

SEQ ID NO: 39311 - protein, 7 aa, synthetic construct
CKPRTSE

SEQ ID NO: 39312 - protein, 7 aa, synthetic construct
SDGFSKW

SEQ ID NO: 39313 - protein, 7 aa, synthetic construct
LHRLGEH

SEQ ID NO: 39314 - protein, 7 aa, synthetic construct
PYARSPE

SEQ ID NO: 39315 - protein, 7 aa, synthetic construct
CKPQGGT

SEQ ID NO: 39316 - protein, 7 aa, synthetic construct
VSTHTCA

SEQ ID NO: 39317 - protein, 7 aa, synthetic construct
GEEHVRW

SEQ ID NO: 39318 - protein, 7 aa, synthetic construct
TMRDAYP

SEQ ID NO: 39319 - protein, 7 aa, synthetic construct
CGGGKPP

SEQ ID NO: 39320 - protein, 7 aa, synthetic construct
RGDFHMY

SEQ ID NO: 39321 - protein, 7 aa, synthetic construct
VCRPCAG

SEQ ID NO: 39322 - protein, 7 aa, synthetic construct
KDEFTVY

SEQ ID NO: 39323 - protein, 7 aa, synthetic construct
YSRIAPN

SEQ ID NO: 39324 - protein, 7 aa, synthetic construct
LPRTGNW

SEQ ID NO: 39325 - protein, 7 aa, synthetic construct
REEFVSY

SEQ ID NO: 39326 - protein, 7 aa, synthetic construct
REGTSYW

SEQ ID NO: 39327 - protein, 7 aa, synthetic construct
CREGTRL

SEQ ID NO: 39328 - protein, 7 aa, synthetic construct
YWSQVKE

SEQ ID NO: 39329 - protein, 7 aa, synthetic construct
YSRVQDD

SEQ ID NO: 39330 - protein, 7 aa, synthetic construct
VSTHECA

SEQ ID NO: 39331 - protein, 7 aa, synthetic construct
YHKSQSY

SEQ ID NO: 39332 - protein, 7 aa, synthetic construct
YFHGLIA

SEQ ID NO: 39333 - protein, 7 aa, synthetic construct
YFTKQID

SEQ ID NO: 39334 - protein, 7 aa, synthetic construct
YAKGEPC

SEQ ID NO: 39335 - protein, 7 aa, synthetic construct
GEEGVRW

SEQ ID NO: 39336 - protein, 7 aa, synthetic construct
RGDYTPW

SEQ ID NO: 39337 - protein, 7 aa, synthetic construct
LSRASRD

SEQ ID NO: 39338 - protein, 7 aa, synthetic construct
YSRIGPQ

SEQ ID NO: 39339 - protein, 7 aa, synthetic construct
YYTGRLD

SEQ ID NO: 39340 - protein, 7 aa, synthetic construct
YYSGVKQ

SEQ ID NO: 39341 - protein, 7 aa, synthetic construct
LQKPCLT

SEQ ID NO: 39342 - protein, 7 aa, synthetic construct
WAKSGPN

SEQ ID NO: 39343 - protein, 7 aa, synthetic construct
YFSGQTS

SEQ ID NO: 39344 - protein, 7 aa, synthetic construct
YWAGVRD

SEQ ID NO: 39345 - protein, 7 aa, synthetic construct
YWSGMHE

SEQ ID NO: 39346 - protein, 7 aa, synthetic construct
RDDFSIY

SEQ ID NO: 39347 - protein, 7 aa, synthetic construct
YHRLHPL

SEQ ID NO: 39348 - protein, 7 aa, synthetic construct
CNKPGTA

SEQ ID NO: 39349 - protein, 7 aa, synthetic construct
YFSGRQD

SEQ ID NO: 39350 - protein, 7 aa, synthetic construct
IARTGWD

SEQ ID NO: 39351 - protein, 7 aa, synthetic construct
GCMTKCG

SEQ ID NO: 39352 - protein, 7 aa, synthetic construct
YFTGMTA

SEQ ID NO: 39353 - protein, 7 aa, synthetic construct
YSRIQPN

SEQ ID NO: 39354 - protein, 7 aa, synthetic construct
YWSKVPD

SEQ ID NO: 39355 - protein, 7 aa, synthetic construct
CRPMCKP

SEQ ID NO: 39356 - protein, 7 aa, synthetic construct
GCRPGDI

SEQ ID NO: 39357 - protein, 7 aa, synthetic construct
YFSGRTS

SEQ ID NO: 39358 - protein, 7 aa, synthetic construct
KDDYTRF

SEQ ID NO: 39359 - protein, 7 aa, synthetic construct
VDDWSPF

SEQ ID NO: 39360 - protein, 7 aa, synthetic construct
APNTVKW

SEQ ID NO: 39361 - protein, 7 aa, synthetic construct
YFHGMVE

SEQ ID NO: 39362 - protein, 7 aa, synthetic construct
LFSGPKC

SEQ ID NO: 39363 - protein, 7 aa, synthetic construct
MTGKSCL

SEQ ID NO: 39364 - protein, 7 aa, synthetic construct
ISGRGWD

SEQ ID NO: 39365 - protein, 7 aa, synthetic construct
YPYGTNA

SEQ ID NO: 39366 - protein, 7 aa, synthetic construct
CGQKCRP

SEQ ID NO: 39367 - protein, 7 aa, synthetic construct
CRTRSPE

SEQ ID NO: 39368 - protein, 7 aa, synthetic construct
YWTGQLA

SEQ ID NO: 39369 - protein, 7 aa, synthetic construct
RDEFTKF

SEQ ID NO: 39370 - protein, 7 aa, synthetic construct
YFTGMTE

SEQ ID NO: 39371 - protein, 7 aa, synthetic construct
NGNACRP

SEQ ID NO: 39372 - protein, 7 aa, synthetic construct
CTYKTGH

SEQ ID NO: 39373 - protein, 7 aa, synthetic construct
CTSKTDH

SEQ ID NO: 39374 - protein, 7 aa, synthetic construct
YSRAQLD

SEQ ID NO: 39375 - protein, 7 aa, synthetic construct
RTYDSYA

SEQ ID NO: 39376 - protein, 7 aa, synthetic construct
CKALSQD

SEQ ID NO: 39377 - protein, 7 aa, synthetic construct
YGKVGMC

SEQ ID NO: 39378 - protein, 7 aa, synthetic construct
YWHGVKD

SEQ ID NO: 39379 - protein, 7 aa, synthetic construct
YHARSPL

SEQ ID NO: 39380 - protein, 7 aa, synthetic construct
YSRLQAI

SEQ ID NO: 39381 - protein, 7 aa, synthetic construct
YFSGLHA

SEQ ID NO: 39382 - protein, 7 aa, synthetic construct
CKGLPPP

SEQ ID NO: 39383 - protein, 7 aa, synthetic construct
CDGSVKA

SEQ ID NO: 39384 - protein, 7 aa, synthetic construct
GAGGVCP

SEQ ID NO: 39385 - protein, 7 aa, synthetic construct
YYTGKLE

SEQ ID NO: 39386 - protein, 7 aa, synthetic construct
CRSGDAA

SEQ ID NO: 39387 - protein, 7 aa, synthetic construct
TWDGLIP

SEQ ID NO: 39388 - protein, 7 aa, synthetic construct
FHRLSPG

SEQ ID NO: 39389 - protein, 7 aa, synthetic construct
RNDFVSW

SEQ ID NO: 39390 - protein, 7 aa, synthetic construct
MWDGTNA

SEQ ID NO: 39391 - protein, 7 aa, synthetic construct
CFKPMTA

SEQ ID NO: 39392 - protein, 7 aa, synthetic construct
WTNMCKA

SEQ ID NO: 39393 - protein, 7 aa, synthetic construct
CKGRDID

SEQ ID NO: 39394 - protein, 7 aa, synthetic construct
GSGESRW

SEQ ID NO: 39395 - protein, 7 aa, synthetic construct
YSRIGPT

SEQ ID NO: 39396 - protein, 7 aa, synthetic construct
FFSGQVE

SEQ ID NO: 39397 - protein, 7 aa, synthetic construct
YWTGTIE

SEQ ID NO: 39398 - protein, 7 aa, synthetic construct
YWSAVQE

SEQ ID NO: 39399 - protein, 7 aa, synthetic construct
YWEGVKE

SEQ ID NO: 39400 - protein, 7 aa, synthetic construct
YEEGCKE

SEQ ID NO: 39401 - protein, 7 aa, synthetic construct
RGGDVFP

SEQ ID NO: 39402 - protein, 7 aa, synthetic construct
YVKSQPQ

SEQ ID NO: 39403 - protein, 7 aa, synthetic construct
RLESVNW

SEQ ID NO: 39404 - protein, 7 aa, synthetic construct
YWTGKME

SEQ ID NO: 39405 - protein, 7 aa, synthetic construct
WWSGQKD

SEQ ID NO: 39406 - protein, 7 aa, synthetic construct
RDGSSTW

SEQ ID NO: 39407 - protein, 7 aa, synthetic construct
WPFGVDA

SEQ ID NO: 39408 - protein, 7 aa, synthetic construct
YFHGRSE

SEQ ID NO: 39409 - protein, 7 aa, synthetic construct
CGGDRKS

SEQ ID NO: 39410 - protein, 7 aa, synthetic construct
KDDFVAY

SEQ ID NO: 39411 - protein, 7 aa, synthetic construct
VPERSCV

SEQ ID NO: 39412 - protein, 7 aa, synthetic construct
CKEVKRD

SEQ ID NO: 39413 - protein, 7 aa, synthetic construct
YSRIQQN

SEQ ID NO: 39414 - protein, 7 aa, synthetic construct
IQLDCKG

SEQ ID NO: 39415 - protein, 7 aa, synthetic construct
YFTHKLD

SEQ ID NO: 39416 - protein, 7 aa, synthetic construct
YWAGKVD

SEQ ID NO: 39417 - protein, 7 aa, synthetic construct
REESLYW

SEQ ID NO: 39418 - protein, 7 aa, synthetic construct
YFTGVCP

SEQ ID NO: 39419 - protein, 7 aa, synthetic construct
GGEYVRW

SEQ ID NO: 39420 - protein, 7 aa, synthetic construct
MEPGCKE

SEQ ID NO: 39421 - protein, 7 aa, synthetic construct
YDSTNGR

SEQ ID NO: 39422 - protein, 7 aa, synthetic construct
CKPQAGG

SEQ ID NO: 39423 - protein, 7 aa, synthetic construct
YFAGIQA

SEQ ID NO: 39424 - protein, 7 aa, synthetic construct
WWSGTQA

SEQ ID NO: 39425 - protein, 7 aa, synthetic construct
YVRYDSG

SEQ ID NO: 39426 - protein, 7 aa, synthetic construct
GCPFKPQ

SEQ ID NO: 39427 - protein, 7 aa, synthetic construct
YFTGKED

SEQ ID NO: 39428 - protein, 7 aa, synthetic construct
RSEFMVY

SEQ ID NO: 39429 - protein, 7 aa, synthetic construct
ALYDRGW

SEQ ID NO: 39430 - protein, 7 aa, synthetic construct
FWTGVKD

SEQ ID NO: 39431 - protein, 7 aa, synthetic construct
RDGQSAY

SEQ ID NO: 39432 - protein, 7 aa, synthetic construct
YHRLQSV

SEQ ID NO: 39433 - protein, 7 aa, synthetic construct
YCKGPEL

SEQ ID NO: 39434 - protein, 7 aa, synthetic construct
YLKSQSK

SEQ ID NO: 39435 - protein, 7 aa, synthetic construct
CTLKTGH

SEQ ID NO: 39436 - protein, 7 aa, synthetic construct
LWTGENA

SEQ ID NO: 39437 - protein, 7 aa, synthetic construct
CKPQVVG

SEQ ID NO: 39438 - protein, 7 aa, synthetic construct
FFSGIHA

SEQ ID NO: 39439 - protein, 7 aa, synthetic construct
YFAGIIS

SEQ ID NO: 39440 - protein, 7 aa, synthetic construct
RAFDAYE

SEQ ID NO: 39441 - protein, 7 aa, synthetic construct
RGEYMYP

SEQ ID NO: 39442 - protein, 7 aa, synthetic construct
FWSGIHS

SEQ ID NO: 39443 - protein, 7 aa, synthetic construct
YSRLSTN

SEQ ID NO: 39444 - protein, 7 aa, synthetic construct
YFTKNCE

SEQ ID NO: 39445 - protein, 7 aa, synthetic construct
CTPYLHE

SEQ ID NO: 39446 - protein, 7 aa, synthetic construct
YHRLGDH

SEQ ID NO: 39447 - protein, 7 aa, synthetic construct
YLISQSY

SEQ ID NO: 39448 - protein, 7 aa, synthetic construct
YYSGIRD

SEQ ID NO: 39449 - protein, 7 aa, synthetic construct
RDSTHGV

SEQ ID NO: 39450 - protein, 7 aa, synthetic construct
IPIKCPS

SEQ ID NO: 39451 - protein, 7 aa, synthetic construct
CPRNTPP

SEQ ID NO: 39452 - protein, 7 aa, synthetic construct
YWSGIHS

SEQ ID NO: 39453 - protein, 7 aa, synthetic construct
FFTGYVD

SEQ ID NO: 39454 - protein, 7 aa, synthetic construct
HTGTSCL

SEQ ID NO: 39455 - protein, 7 aa, synthetic construct
YWSGTHE

SEQ ID NO: 39456 - protein, 7 aa, synthetic construct
GSEFLPW

SEQ ID NO: 39457 - protein, 7 aa, synthetic construct
YFSGVAM

SEQ ID NO: 39458 - protein, 7 aa, synthetic construct
FWSGVRE

SEQ ID NO: 39459 - protein, 7 aa, synthetic construct
REMSVYP

SEQ ID NO: 39460 - protein, 7 aa, synthetic construct
RDQYVYP

SEQ ID NO: 39461 - protein, 7 aa, synthetic construct
RLDSREW

SEQ ID NO: 39462 - protein, 7 aa, synthetic construct
REESVFP

SEQ ID NO: 39463 - protein, 7 aa, synthetic construct
CKPGSPG

SEQ ID NO: 39464 - protein, 7 aa, synthetic construct
CKRQSPE

SEQ ID NO: 39465 - protein, 7 aa, synthetic construct
YWSGKIE

SEQ ID NO: 39466 - protein, 7 aa, synthetic construct
TANCLKP

SEQ ID NO: 39467 - protein, 7 aa, synthetic construct
GCFSEGR

SEQ ID NO: 39468 - protein, 7 aa, synthetic construct
GCGTKLG

SEQ ID NO: 39469 - protein, 7 aa, synthetic construct
YWSGMQE

SEQ ID NO: 39470 - protein, 7 aa, synthetic construct
CKPGAAS

SEQ ID NO: 39471 - protein, 7 aa, synthetic construct
VARTGWD

SEQ ID NO: 39472 - protein, 7 aa, synthetic construct
RGDFSSW

SEQ ID NO: 39473 - protein, 7 aa, synthetic construct
GDGFSTW

SEQ ID NO: 39474 - protein, 7 aa, synthetic construct
YVRSDRA

SEQ ID NO: 39475 - protein, 7 aa, synthetic construct
YSKIGKD

SEQ ID NO: 39476 - protein, 7 aa, synthetic construct
CRDNKLE

SEQ ID NO: 39477 - protein, 7 aa, synthetic construct
FVKSQPC

SEQ ID NO: 39478 - protein, 7 aa, synthetic construct
GEPTCRP

SEQ ID NO: 39479 - protein, 7 aa, synthetic construct
RDEYVYF

SEQ ID NO: 39480 - protein, 7 aa, synthetic construct
GCRPCSE

SEQ ID NO: 39481 - protein, 7 aa, synthetic construct
KSDFTTY

SEQ ID NO: 39482 - protein, 7 aa, synthetic construct
LPRAGDW

SEQ ID NO: 39483 - protein, 7 aa, synthetic construct
FFAGIIA

SEQ ID NO: 39484 - protein, 7 aa, synthetic construct
YYSGVIE

SEQ ID NO: 39485 - protein, 7 aa, synthetic construct
CRNGTTP

SEQ ID NO: 39486 - protein, 7 aa, synthetic construct
CLKSQSY

SEQ ID NO: 39487 - protein, 7 aa, synthetic construct
YSRIGPV

SEQ ID NO: 39488 - protein, 7 aa, synthetic construct
PRDVCPK

SEQ ID NO: 39489 - protein, 7 aa, synthetic construct
YFHGIPD

SEQ ID NO: 39490 - protein, 7 aa, synthetic construct
YFTNVRE

SEQ ID NO: 39491 - protein, 7 aa, synthetic construct
GGGSSHW

SEQ ID NO: 39492 - protein, 7 aa, synthetic construct
YWSGTVS

SEQ ID NO: 39493 - protein, 7 aa, synthetic construct
CKPMKLD

SEQ ID NO: 39494 - protein, 7 aa, synthetic construct
CKIPSAG

SEQ ID NO: 39495 - protein, 7 aa, synthetic construct
CKGLPVP

SEQ ID NO: 39496 - protein, 7 aa, synthetic construct
LRDGTMA

SEQ ID NO: 39497 - protein, 7 aa, synthetic construct
GSGTKCG

SEQ ID NO: 39498 - protein, 7 aa, synthetic construct
CKTPDRA

SEQ ID NO: 39499 - protein, 7 aa, synthetic construct
CKPQNSS

SEQ ID NO: 39500 - protein, 7 aa, synthetic construct
YWSGVGA

SEQ ID NO: 39501 - protein, 7 aa, synthetic construct
YSRIMPN

SEQ ID NO: 39502 - protein, 7 aa, synthetic construct
CPPKGPS

SEQ ID NO: 39503 - protein, 7 aa, synthetic construct
CNSQKLG

SEQ ID NO: 39504 - protein, 7 aa, synthetic construct
TRDGYNA

SEQ ID NO: 39505 - protein, 7 aa, synthetic construct
WAPMCKA

SEQ ID NO: 39506 - protein, 7 aa, synthetic construct
CNQETTR

SEQ ID NO: 39507 - protein, 7 aa, synthetic construct
ETGMCKP

SEQ ID NO: 39508 - protein, 7 aa, synthetic construct
YFAGVRD

SEQ ID NO: 39509 - protein, 7 aa, synthetic construct
YFHGKHD

SEQ ID NO: 39510 - protein, 7 aa, synthetic construct
FWSGVTE

SEQ ID NO: 39511 - protein, 7 aa, synthetic construct
INGGKCD

SEQ ID NO: 39512 - protein, 7 aa, synthetic construct
YWHGVSE

SEQ ID NO: 39513 - protein, 7 aa, synthetic construct
YWSGVGE

SEQ ID NO: 39514 - protein, 7 aa, synthetic construct
GGEGIRW

SEQ ID NO: 39515 - protein, 7 aa, synthetic construct
YFAGRAD

SEQ ID NO: 39516 - protein, 7 aa, synthetic construct
CKFPVME

SEQ ID NO: 39517 - protein, 7 aa, synthetic construct
FFSGQIE

SEQ ID NO: 39518 - protein, 7 aa, synthetic construct
PYARSAD

SEQ ID NO: 39519 - protein, 7 aa, synthetic construct
YFHGLRE

SEQ ID NO: 39520 - protein, 7 aa, synthetic construct
WWGGVKE

SEQ ID NO: 39521 - protein, 7 aa, synthetic construct
RGEFVPF

SEQ ID NO: 39522 - protein, 7 aa, synthetic construct
GGEGSKW

SEQ ID NO: 39523 - protein, 7 aa, synthetic construct
CKTKSQD

SEQ ID NO: 39524 - protein, 7 aa, synthetic construct
PYAKSSE

SEQ ID NO: 39525 - protein, 7 aa, synthetic construct
LSKVGFD

SEQ ID NO: 39526 - protein, 7 aa, synthetic construct
PMGSNTW

SEQ ID NO: 39527 - protein, 7 aa, synthetic construct
YHRLDPN

SEQ ID NO: 39528 - protein, 7 aa, synthetic construct
HLASHDW

SEQ ID NO: 39529 - protein, 7 aa, synthetic construct
HPSRCPE

SEQ ID NO: 39530 - protein, 7 aa, synthetic construct
TWTGENA

SEQ ID NO: 39531 - protein, 7 aa, synthetic construct
DMQSNLW

SEQ ID NO: 39532 - protein, 7 aa, synthetic construct
RSNFVFP

SEQ ID NO: 39533 - protein, 7 aa, synthetic construct
GSEHVRW

SEQ ID NO: 39534 - protein, 7 aa, synthetic construct
RGPDTFP

SEQ ID NO: 39535 - protein, 7 aa, synthetic construct
DPSSSKW

SEQ ID NO: 39536 - protein, 7 aa, synthetic construct
CAPMLHE

SEQ ID NO: 39537 - protein, 7 aa, synthetic construct
YFHGQLD

SEQ ID NO: 39538 - protein, 7 aa, synthetic construct
CKPGTPA

SEQ ID NO: 39539 - protein, 7 aa, synthetic construct
MFDGTRA

SEQ ID NO: 39540 - protein, 7 aa, synthetic construct
YVRSNPL

SEQ ID NO: 39541 - protein, 7 aa, synthetic construct
YHAKQDN

SEQ ID NO: 39542 - protein, 7 aa, synthetic construct
YFHGKSD

SEQ ID NO: 39543 - protein, 7 aa, synthetic construct
SMQARSW

SEQ ID NO: 39544 - protein, 7 aa, synthetic construct
RGDSRSW

SEQ ID NO: 39545 - protein, 7 aa, synthetic construct
QLDSRDW

SEQ ID NO: 39546 - protein, 7 aa, synthetic construct
LHRLHPD

SEQ ID NO: 39547 - protein, 7 aa, synthetic construct
NMEDRKW

SEQ ID NO: 39548 - protein, 7 aa, synthetic construct
SMQDRTW

SEQ ID NO: 39549 - protein, 7 aa, synthetic construct
FFTGKLD

SEQ ID NO: 39550 - protein, 7 aa, synthetic construct
YSRLQST

SEQ ID NO: 39551 - protein, 7 aa, synthetic construct
VMRDRGW

SEQ ID NO: 39552 - protein, 7 aa, synthetic construct
YFTGSRE

SEQ ID NO: 39553 - protein, 7 aa, synthetic construct
RTRDSYP

SEQ ID NO: 39554 - protein, 7 aa, synthetic construct
KDGFSGW

SEQ ID NO: 39555 - protein, 7 aa, synthetic construct
CKPPSGP

SEQ ID NO: 39556 - protein, 7 aa, synthetic construct
VMDSRDW

SEQ ID NO: 39557 - protein, 7 aa, synthetic construct
HRSTNGV

SEQ ID NO: 39558 - protein, 7 aa, synthetic construct
KPANYDC

SEQ ID NO: 39559 - protein, 7 aa, synthetic construct
CSNKQTP

SEQ ID NO: 39560 - protein, 7 aa, synthetic construct
YYSRIIE

SEQ ID NO: 39561 - protein, 7 aa, synthetic construct
YFEGRID

SEQ ID NO: 39562 - protein, 7 aa, synthetic construct
YARLSPL

SEQ ID NO: 39563 - protein, 7 aa, synthetic construct
RTLDCDR

SEQ ID NO: 39564 - protein, 7 aa, synthetic construct
CKPGAGT

SEQ ID NO: 39565 - protein, 7 aa, synthetic construct
CGKRDPD

SEQ ID NO: 39566 - protein, 7 aa, synthetic construct
CKPGPGM

SEQ ID NO: 39567 - protein, 7 aa, synthetic construct
YIKSQTC

SEQ ID NO: 39568 - protein, 7 aa, synthetic construct
QNDHVRW

SEQ ID NO: 39569 - protein, 7 aa, synthetic construct
GSISSTW

SEQ ID NO: 39570 - protein, 7 aa, synthetic construct
VMGDRKW

SEQ ID NO: 39571 - protein, 7 aa, synthetic construct
CKRGLPE

SEQ ID NO: 39572 - protein, 7 aa, synthetic construct
CKPSPLE

SEQ ID NO: 39573 - protein, 7 aa, synthetic construct
WWSQVKE

SEQ ID NO: 39574 - protein, 7 aa, synthetic construct
SMQDRLW

SEQ ID NO: 39575 - protein, 7 aa, synthetic construct
YFTGEME

SEQ ID NO: 39576 - protein, 7 aa, synthetic construct
WFSGKID

SEQ ID NO: 39577 - protein, 7 aa, synthetic construct
VPDSVRW

SEQ ID NO: 39578 - protein, 7 aa, synthetic construct
GSGQSSW

SEQ ID NO: 39579 - protein, 7 aa, synthetic construct
KKYEINN

SEQ ID NO: 39580 - protein, 7 aa, synthetic construct
CRDKNVE

SEQ ID NO: 39581 - protein, 7 aa, synthetic construct
CKSEMKM

SEQ ID NO: 39582 - protein, 7 aa, synthetic construct
YVRFDQG

SEQ ID NO: 39583 - protein, 7 aa, synthetic construct
GSNTSRW

SEQ ID NO: 39584 - protein, 7 aa, synthetic construct
RGVDMYP

SEQ ID NO: 39585 - protein, 7 aa, synthetic construct
YHARQAN

SEQ ID NO: 39586 - protein, 7 aa, synthetic construct
LKKPCLT

SEQ ID NO: 39587 - protein, 7 aa, synthetic construct
CKPPPIE

SEQ ID NO: 39588 - protein, 7 aa, synthetic construct
KDDYSYY

SEQ ID NO: 39589 - protein, 7 aa, synthetic construct
YARGSPN

SEQ ID NO: 39590 - protein, 7 aa, synthetic construct
RLPDVYP

SEQ ID NO: 39591 - protein, 7 aa, synthetic construct
YSKYCVN

SEQ ID NO: 39592 - protein, 7 aa, synthetic construct
SMQDRKW

SEQ ID NO: 39593 - protein, 7 aa, synthetic construct
RTYDVYP

SEQ ID NO: 39594 - protein, 7 aa, synthetic construct
FWAGVKD

SEQ ID NO: 39595 - protein, 7 aa, synthetic construct
YVRFDAN

SEQ ID NO: 39596 - protein, 7 aa, synthetic construct
MLSDRLW

SEQ ID NO: 39597 - protein, 7 aa, synthetic construct
REDMVSW

SEQ ID NO: 39598 - protein, 7 aa, synthetic construct
LARSGWD

SEQ ID NO: 39599 - protein, 7 aa, synthetic construct
YFSGRSD

SEQ ID NO: 39600 - protein, 7 aa, synthetic construct
PVPDCLA

SEQ ID NO: 39601 - protein, 7 aa, synthetic construct
PYAKSAN

SEQ ID NO: 39602 - protein, 7 aa, synthetic construct
CQSKTGH

SEQ ID NO: 39603 - protein, 7 aa, synthetic construct
IPRTCPA

SEQ ID NO: 39604 - protein, 7 aa, synthetic construct
YWSGTMA

SEQ ID NO: 39605 - protein, 7 aa, synthetic construct
YVRSCPM

SEQ ID NO: 39606 - protein, 7 aa, synthetic construct
IDEWKTW

SEQ ID NO: 39607 - protein, 7 aa, synthetic construct
TPDSVRW

SEQ ID NO: 39608 - protein, 7 aa, synthetic construct
MTGISCL

SEQ ID NO: 39609 - protein, 7 aa, synthetic construct
SMMDRSW

SEQ ID NO: 39610 - protein, 7 aa, synthetic construct
DLKSANW

SEQ ID NO: 39611 - protein, 7 aa, synthetic construct
GKLGSCD

SEQ ID NO: 39612 - protein, 7 aa, synthetic construct
RDGASGW

SEQ ID NO: 39613 - protein, 7 aa, synthetic construct
IASRCPH

SEQ ID NO: 39614 - protein, 7 aa, synthetic construct
GVEHVRW

SEQ ID NO: 39615 - protein, 7 aa, synthetic construct
YWTGMTS

SEQ ID NO: 39616 - protein, 7 aa, synthetic construct
YFSGVRN

SEQ ID NO: 39617 - protein, 7 aa, synthetic construct
GGASSRW

SEQ ID NO: 39618 - protein, 7 aa, synthetic construct
YFSGTHQ

SEQ ID NO: 39619 - protein, 7 aa, synthetic construct
YWTGMQD

SEQ ID NO: 39620 - protein, 7 aa, synthetic construct
FSRVQPN

SEQ ID NO: 39621 - protein, 7 aa, synthetic construct
RSIDAFP

SEQ ID NO: 39622 - protein, 7 aa, synthetic construct
YFHGKQD

SEQ ID NO: 39623 - protein, 7 aa, synthetic construct
GDGNSRW

SEQ ID NO: 39624 - protein, 7 aa, synthetic construct
YYTGVLE

SEQ ID NO: 39625 - protein, 7 aa, synthetic construct
RNGTSAW

SEQ ID NO: 39626 - protein, 7 aa, synthetic construct
YFTGVAT

SEQ ID NO: 39627 - protein, 7 aa, synthetic construct
CKPLQPA

SEQ ID NO: 39628 - protein, 7 aa, synthetic construct
RAFDSYP

SEQ ID NO: 39629 - protein, 7 aa, synthetic construct
CVQTKKE

SEQ ID NO: 39630 - protein, 7 aa, synthetic construct
YFSGRPN

SEQ ID NO: 39631 - protein, 7 aa, synthetic construct
PMQDRSW

SEQ ID NO: 39632 - protein, 7 aa, synthetic construct
YETGCKE

SEQ ID NO: 39633 - protein, 7 aa, synthetic construct
GDEWKTW

SEQ ID NO: 39634 - protein, 7 aa, synthetic construct
LDDWTTY

SEQ ID NO: 39635 - protein, 7 aa, synthetic construct
YCKSQSY

SEQ ID NO: 39636 - protein, 7 aa, synthetic construct
YFHGTVE

SEQ ID NO: 39637 - protein, 7 aa, synthetic construct
YHIKSCD

SEQ ID NO: 39638 - protein, 7 aa, synthetic construct
YWSGVQV

SEQ ID NO: 39639 - protein, 7 aa, synthetic construct
FFSGVRD

SEQ ID NO: 39640 - protein, 7 aa, synthetic construct
MLSDRTW

SEQ ID NO: 39641 - protein, 7 aa, synthetic construct
WTQACPK

SEQ ID NO: 39642 - protein, 7 aa, synthetic construct
LSRVAFD

SEQ ID NO: 39643 - protein, 7 aa, synthetic construct
YFTGRND

SEQ ID NO: 39644 - protein, 7 aa, synthetic construct
ERKVHPQ

SEQ ID NO: 39645 - protein, 7 aa, synthetic construct
YVRSQPH

SEQ ID NO: 39646 - protein, 7 aa, synthetic construct
YFTGTHT

SEQ ID NO: 39647 - protein, 7 aa, synthetic construct
SAQTCKP

SEQ ID NO: 39648 - protein, 7 aa, synthetic construct
YWAGITE

SEQ ID NO: 39649 - protein, 7 aa, synthetic construct
CKEEKKE

SEQ ID NO: 39650 - protein, 7 aa, synthetic construct
YYSGVMA

SEQ ID NO: 39651 - protein, 7 aa, synthetic construct
IPCKPCG

SEQ ID NO: 39652 - protein, 7 aa, synthetic construct
TQIAPDC

SEQ ID NO: 39653 - protein, 7 aa, synthetic construct
WWHGIPE

SEQ ID NO: 39654 - protein, 7 aa, synthetic construct
RGHEGYF

SEQ ID NO: 39655 - protein, 7 aa, synthetic construct
RDNTVYP

SEQ ID NO: 39656 - protein, 7 aa, synthetic construct
YHKGGCE

SEQ ID NO: 39657 - protein, 7 aa, synthetic construct
GGSTSTW

SEQ ID NO: 39658 - protein, 7 aa, synthetic construct
CMKTPER

SEQ ID NO: 39659 - protein, 7 aa, synthetic construct
GGAGSHW

SEQ ID NO: 39660 - protein, 7 aa, synthetic construct
CGKLKPE

SEQ ID NO: 39661 - protein, 7 aa, synthetic construct
CKPVRGD

SEQ ID NO: 39662 - protein, 7 aa, synthetic construct
CKPQTPQ

SEQ ID NO: 39663 - protein, 7 aa, synthetic construct
YSRLHQL

SEQ ID NO: 39664 - protein, 7 aa, synthetic construct
WWSGVQL

SEQ ID NO: 39665 - protein, 7 aa, synthetic construct
YWSGTRE

SEQ ID NO: 39666 - protein, 7 aa, synthetic construct
GGGVVRW

SEQ ID NO: 39667 - protein, 7 aa, synthetic construct
YHAKSPC

SEQ ID NO: 39668 - protein, 7 aa, synthetic construct
CKSDHKP

SEQ ID NO: 39669 - protein, 7 aa, synthetic construct
GDEWETY

SEQ ID NO: 39670 - protein, 7 aa, synthetic construct
RDQFTSY

SEQ ID NO: 39671 - protein, 7 aa, synthetic construct
CVKPMTA

SEQ ID NO: 39672 - protein, 7 aa, synthetic construct
CKPDEFG

SEQ ID NO: 39673 - protein, 7 aa, synthetic construct
GSPGAHW

SEQ ID NO: 39674 - protein, 7 aa, synthetic construct
CSPYLHE

SEQ ID NO: 39675 - protein, 7 aa, synthetic construct
YFTGTWS

SEQ ID NO: 39676 - protein, 7 aa, synthetic construct
YHRLNDW

SEQ ID NO: 39677 - protein, 7 aa, synthetic construct
VDGSCKA

SEQ ID NO: 39678 - protein, 7 aa, synthetic construct
CKKYGGD

SEQ ID NO: 39679 - protein, 7 aa, synthetic construct
IMLDRGW

SEQ ID NO: 39680 - protein, 7 aa, synthetic construct
YFTGRFD

SEQ ID NO: 39681 - protein, 7 aa, synthetic construct
YVRSGPD

SEQ ID NO: 39682 - protein, 7 aa, synthetic construct
YHRLQST

SEQ ID NO: 39683 - protein, 7 aa, synthetic construct
YFTGSVD

SEQ ID NO: 39684 - protein, 7 aa, synthetic construct
RDGNSRW

SEQ ID NO: 39685 - protein, 7 aa, synthetic construct
WFSGKVE

SEQ ID NO: 39686 - protein, 7 aa, synthetic construct
YWTGTME

SEQ ID NO: 39687 - protein, 7 aa, synthetic construct
GGSGSTW

SEQ ID NO: 39688 - protein, 7 aa, synthetic construct
YWHGIPE

SEQ ID NO: 39689 - protein, 7 aa, synthetic construct
CKDSARL

SEQ ID NO: 39690 - protein, 7 aa, synthetic construct
CTSKLGH

SEQ ID NO: 39691 - protein, 7 aa, synthetic construct
WVRSDVK

SEQ ID NO: 39692 - protein, 7 aa, synthetic construct
YWTGMTE

SEQ ID NO: 39693 - protein, 7 aa, synthetic construct
YFSGMHS

SEQ ID NO: 39694 - protein, 7 aa, synthetic construct
YFHGTVD

SEQ ID NO: 39695 - protein, 7 aa, synthetic construct
YFQGVRE

SEQ ID NO: 39696 - protein, 7 aa, synthetic construct
RSGPCPF

SEQ ID NO: 39697 - protein, 7 aa, synthetic construct
WHPMCKA

SEQ ID NO: 39698 - protein, 7 aa, synthetic construct
RPETCSP

SEQ ID NO: 39699 - protein, 7 aa, synthetic construct
GDEWQPY

SEQ ID NO: 39700 - protein, 7 aa, synthetic construct
VMYDSYP

SEQ ID NO: 39701 - protein, 7 aa, synthetic construct
GCKPCPS

SEQ ID NO: 39702 - protein, 7 aa, synthetic construct
CKPGMGE

SEQ ID NO: 39703 - protein, 7 aa, synthetic construct
GCRHGDC

SEQ ID NO: 39704 - protein, 7 aa, synthetic construct
YWAGVSA

SEQ ID NO: 39705 - protein, 7 aa, synthetic construct
YWSGKID

SEQ ID NO: 39706 - protein, 7 aa, synthetic construct
YFQGKRD

SEQ ID NO: 39707 - protein, 7 aa, synthetic construct
DLRDVKW

SEQ ID NO: 39708 - protein, 7 aa, synthetic construct
DAFRGFD

SEQ ID NO: 39709 - protein, 7 aa, synthetic construct
CKDGTTS

SEQ ID NO: 39710 - protein, 7 aa, synthetic construct
KDGYSMY

SEQ ID NO: 39711 - protein, 7 aa, synthetic construct
TWDGMIA

SEQ ID NO: 39712 - protein, 7 aa, synthetic construct
KHDFTGC

SEQ ID NO: 39713 - protein, 7 aa, synthetic construct
IGRTGWD

SEQ ID NO: 39714 - protein, 7 aa, synthetic construct
TLSSRDW

SEQ ID NO: 39715 - protein, 7 aa, synthetic construct
CKDNRAL

SEQ ID NO: 39716 - protein, 7 aa, synthetic construct
YWSGQKD

SEQ ID NO: 39717 - protein, 7 aa, synthetic construct
RTYDSIA

SEQ ID NO: 39718 - protein, 7 aa, synthetic construct
VSTHSCA

SEQ ID NO: 39719 - protein, 7 aa, synthetic construct
YYSGQKE

SEQ ID NO: 39720 - protein, 7 aa, synthetic construct
CKKPSPE

SEQ ID NO: 39721 - protein, 7 aa, synthetic construct
YFTRVME

SEQ ID NO: 39722 - protein, 7 aa, synthetic construct
YYTGVSL

SEQ ID NO: 39723 - protein, 7 aa, synthetic construct
YFSGLRE

SEQ ID NO: 39724 - protein, 7 aa, synthetic construct
CAPYLPE

SEQ ID NO: 39725 - protein, 7 aa, synthetic construct
GDGSCKA

SEQ ID NO: 39726 - protein, 7 aa, synthetic construct
YWTGMHE

SEQ ID NO: 39727 - protein, 7 aa, synthetic construct
RLESISW

SEQ ID NO: 39728 - protein, 7 aa, synthetic construct
YFTGMQE

SEQ ID NO: 39729 - protein, 7 aa, synthetic construct
YWQGVRE

SEQ ID NO: 39730 - protein, 7 aa, synthetic construct
YFTAVKE

SEQ ID NO: 39731 - protein, 7 aa, synthetic construct
RDGNSMW

SEQ ID NO: 39732 - protein, 7 aa, synthetic construct
CKTKSTE

SEQ ID NO: 39733 - protein, 7 aa, synthetic construct
RNDFSTY

SEQ ID NO: 39734 - protein, 7 aa, synthetic construct
CKRDAES

SEQ ID NO: 39735 - protein, 7 aa, synthetic construct
CTSKTTH

SEQ ID NO: 39736 - protein, 7 aa, synthetic construct
LRSGCGP

SEQ ID NO: 39737 - protein, 7 aa, synthetic construct
VPSSAIW

SEQ ID NO: 39738 - protein, 7 aa, synthetic construct
SMSDRSW

SEQ ID NO: 39739 - protein, 7 aa, synthetic construct
FWTGKIE

SEQ ID NO: 39740 - protein, 7 aa, synthetic construct
YFHGQLE

SEQ ID NO: 39741 - protein, 7 aa, synthetic construct
GAPACKE

SEQ ID NO: 39742 - protein, 7 aa, synthetic construct
REDYSTY

SEQ ID NO: 39743 - protein, 7 aa, synthetic construct
VGNRGWD

SEQ ID NO: 39744 - protein, 7 aa, synthetic construct
CKSKCLP

SEQ ID NO: 39745 - protein, 7 aa, synthetic construct
GLADRSW

SEQ ID NO: 39746 - protein, 7 aa, synthetic construct
DYASRDW

SEQ ID NO: 39747 - protein, 7 aa, synthetic construct
YFTGVTV

SEQ ID NO: 39748 - protein, 7 aa, synthetic construct
KDDYNVY

SEQ ID NO: 39749 - protein, 7 aa, synthetic construct
GCGGGGG

SEQ ID NO: 39750 - protein, 7 aa, synthetic construct
YVRSDDS

SEQ ID NO: 39751 - protein, 7 aa, synthetic construct
FSKHNYN

SEQ ID NO: 39752 - protein, 7 aa, synthetic construct
CSKLKPG

SEQ ID NO: 39753 - protein, 7 aa, synthetic construct
GNGTSRW

SEQ ID NO: 39754 - protein, 7 aa, synthetic construct
CKAPDKG

SEQ ID NO: 39755 - protein, 7 aa, synthetic construct
YHRLSRD

SEQ ID NO: 39756 - protein, 7 aa, synthetic construct
YFSGMME

SEQ ID NO: 39757 - protein, 7 aa, synthetic construct
YWTGTSA

SEQ ID NO: 39758 - protein, 7 aa, synthetic construct
YFTGCRD

SEQ ID NO: 39759 - protein, 7 aa, synthetic construct
RSGPCAI

SEQ ID NO: 39760 - protein, 7 aa, synthetic construct
HLASHTW

SEQ ID NO: 39761 - protein, 7 aa, synthetic construct
PEAGCKD

SEQ ID NO: 39762 - protein, 7 aa, synthetic construct
KDDFSMY

SEQ ID NO: 39763 - protein, 7 aa, synthetic construct
KRDITCA

SEQ ID NO: 39764 - protein, 7 aa, synthetic construct
CKPRTGE

SEQ ID NO: 39765 - protein, 7 aa, synthetic construct
MFDGTEA

SEQ ID NO: 39766 - protein, 7 aa, synthetic construct
YFSGVPT

SEQ ID NO: 39767 - protein, 7 aa, synthetic construct
RDEFNSF

SEQ ID NO: 39768 - protein, 7 aa, synthetic construct
YTRLDVL

SEQ ID NO: 39769 - protein, 7 aa, synthetic construct
YFAGVVG

SEQ ID NO: 39770 - protein, 7 aa, synthetic construct
QDGSSSW

SEQ ID NO: 39771 - protein, 7 aa, synthetic construct
CKPDYRE

SEQ ID NO: 39772 - protein, 7 aa, synthetic construct
IGERGWD

SEQ ID NO: 39773 - protein, 7 aa, synthetic construct
YYTGVTR

SEQ ID NO: 39774 - protein, 7 aa, synthetic construct
MTGTSCN

SEQ ID NO: 39775 - protein, 7 aa, synthetic construct
YWQGKIA

SEQ ID NO: 39776 - protein, 7 aa, synthetic construct
CKGTDGP

SEQ ID NO: 39777 - protein, 7 aa, synthetic construct
FLKSQSY

SEQ ID NO: 39778 - protein, 7 aa, synthetic construct
CKSGQGA

SEQ ID NO: 39779 - protein, 7 aa, synthetic construct
RGHDVFP

SEQ ID NO: 39780 - protein, 7 aa, synthetic construct
LIKPCLT

SEQ ID NO: 39781 - protein, 7 aa, synthetic construct
YFTGLHN

SEQ ID NO: 39782 - protein, 7 aa, synthetic construct
PMPDRSW

SEQ ID NO: 39783 - protein, 7 aa, synthetic construct
YHRAGLD

SEQ ID NO: 39784 - protein, 7 aa, synthetic construct
YFSGMTE

SEQ ID NO: 39785 - protein, 7 aa, synthetic construct
YWGGVLE

SEQ ID NO: 39786 - protein, 7 aa, synthetic construct
DLNSAKW

SEQ ID NO: 39787 - protein, 7 aa, synthetic construct
VSTHMCA

SEQ ID NO: 39788 - protein, 7 aa, synthetic construct
RDGESAW

SEQ ID NO: 39789 - protein, 7 aa, synthetic construct
REGTSLW

SEQ ID NO: 39790 - protein, 7 aa, synthetic construct
CKSDSKV

SEQ ID NO: 39791 - protein, 7 aa, synthetic construct
YSKIGWD

SEQ ID NO: 39792 - protein, 7 aa, synthetic construct
YTRLNPM

SEQ ID NO: 39793 - protein, 7 aa, synthetic construct
MAGTSCL

SEQ ID NO: 39794 - protein, 7 aa, synthetic construct
CKPGSPM

SEQ ID NO: 39795 - protein, 7 aa, synthetic construct
KDDYVFF

SEQ ID NO: 39796 - protein, 7 aa, synthetic construct
KDDWNTW

SEQ ID NO: 39797 - protein, 7 aa, synthetic construct
YVKLQPN

SEQ ID NO: 39798 - protein, 7 aa, synthetic construct
GIRNVMY

SEQ ID NO: 39799 - protein, 7 aa, synthetic construct
CPRENDG

SEQ ID NO: 39800 - protein, 7 aa, synthetic construct
WVRSQPG

SEQ ID NO: 39801 - protein, 7 aa, synthetic construct
YFSGVTV

SEQ ID NO: 39802 - protein, 7 aa, synthetic construct
YFSGKPE

SEQ ID NO: 39803 - protein, 7 aa, synthetic construct
WWSGVTE

SEQ ID NO: 39804 - protein, 7 aa, synthetic construct
REDTIYW

SEQ ID NO: 39805 - protein, 7 aa, synthetic construct
YFSGVTP

SEQ ID NO: 39806 - protein, 7 aa, synthetic construct
YWSGTIE

SEQ ID NO: 39807 - protein, 7 aa, synthetic construct
REYNVYP

SEQ ID NO: 39808 - protein, 7 aa, synthetic construct
IGSKGWD

SEQ ID NO: 39809 - protein, 7 aa, synthetic construct
CKRTSGE

SEQ ID NO: 39810 - protein, 7 aa, synthetic construct
YWTGMME

SEQ ID NO: 39811 - protein, 7 aa, synthetic construct
VALMGIG

SEQ ID NO: 39812 - protein, 7 aa, synthetic construct
YHRQSDN

SEQ ID NO: 39813 - protein, 7 aa, synthetic construct
YWSGTTD

SEQ ID NO: 39814 - protein, 7 aa, synthetic construct
YEPGCAE

SEQ ID NO: 39815 - protein, 7 aa, synthetic construct
CKLLGKD

SEQ ID NO: 39816 - protein, 7 aa, synthetic construct
YLKSDAY

SEQ ID NO: 39817 - protein, 7 aa, synthetic construct
YVRSDQT

SEQ ID NO: 39818 - protein, 7 aa, synthetic construct
LKDGTPA

SEQ ID NO: 39819 - protein, 7 aa, synthetic construct
CRPPEVE

SEQ ID NO: 39820 - protein, 7 aa, synthetic construct
CKPECGG

SEQ ID NO: 39821 - protein, 7 aa, synthetic construct
YFSGTRT

SEQ ID NO: 39822 - protein, 7 aa, synthetic construct
FWAGIRE

SEQ ID NO: 39823 - protein, 7 aa, synthetic construct
RNEYSTY

SEQ ID NO: 39824 - protein, 7 aa, synthetic construct
YFSGIQP

SEQ ID NO: 39825 - protein, 7 aa, synthetic construct
TVYDSFA

SEQ ID NO: 39826 - protein, 7 aa, synthetic construct
MTTTSCL

SEQ ID NO: 39827 - protein, 7 aa, synthetic construct
YTRLDNM

SEQ ID NO: 39828 - protein, 7 aa, synthetic construct
YWQGKID

SEQ ID NO: 39829 - protein, 7 aa, synthetic construct
GRPGCPF

SEQ ID NO: 39830 - protein, 7 aa, synthetic construct
CKPNPAP

SEQ ID NO: 39831 - protein, 7 aa, synthetic construct
YSRASDN

SEQ ID NO: 39832 - protein, 7 aa, synthetic construct
YFSGQHH

SEQ ID NO: 39833 - protein, 7 aa, synthetic construct
CKSSKQD

SEQ ID NO: 39834 - protein, 7 aa, synthetic construct
YHKYQEN

SEQ ID NO: 39835 - protein, 7 aa, synthetic construct
YYSGIHS

SEQ ID NO: 39836 - protein, 7 aa, synthetic construct
YWEGVKS

SEQ ID NO: 39837 - protein, 7 aa, synthetic construct
YARLSPI

SEQ ID NO: 39838 - protein, 7 aa, synthetic construct
FFTGTVS

SEQ ID NO: 39839 - protein, 7 aa, synthetic construct
CKPGSSG

SEQ ID NO: 39840 - protein, 7 aa, synthetic construct
CRPQMAS

SEQ ID NO: 39841 - protein, 7 aa, synthetic construct
TDGTSLW

SEQ ID NO: 39842 - protein, 7 aa, synthetic construct
WFSGRVE

SEQ ID NO: 39843 - protein, 7 aa, synthetic construct
WLPMCKA

SEQ ID NO: 39844 - protein, 7 aa, synthetic construct
YWSAVPE

SEQ ID NO: 39845 - protein, 7 aa, synthetic construct
GGPGSFW

SEQ ID NO: 39846 - protein, 7 aa, synthetic construct
CKDPCCT

SEQ ID NO: 39847 - protein, 7 aa, synthetic construct
CMERKPE

SEQ ID NO: 39848 - protein, 7 aa, synthetic construct
SGESRTW

SEQ ID NO: 39849 - protein, 7 aa, synthetic construct
YWAGVQE

SEQ ID NO: 39850 - protein, 7 aa, synthetic construct
VPYEGIG

SEQ ID NO: 39851 - protein, 7 aa, synthetic construct
YFAGERD

SEQ ID NO: 39852 - protein, 7 aa, synthetic construct
YVKSDKV

SEQ ID NO: 39853 - protein, 7 aa, synthetic construct
SCKERMP

SEQ ID NO: 39854 - protein, 7 aa, synthetic construct
YWQGVVE

SEQ ID NO: 39855 - protein, 7 aa, synthetic construct
RNEFSGY

SEQ ID NO: 39856 - protein, 7 aa, synthetic construct
CKPKQIE

SEQ ID NO: 39857 - protein, 7 aa, synthetic construct
CAPDWRE

SEQ ID NO: 39858 - protein, 7 aa, synthetic construct
VCKPCPI

SEQ ID NO: 39859 - protein, 7 aa, synthetic construct
RMESSDW

SEQ ID NO: 39860 - protein, 7 aa, synthetic construct
FFHGKID

SEQ ID NO: 39861 - protein, 7 aa, synthetic construct
VMSSQGW

SEQ ID NO: 39862 - protein, 7 aa, synthetic construct
YFTGQAS

SEQ ID NO: 39863 - protein, 7 aa, synthetic construct
CNKPMHA

SEQ ID NO: 39864 - protein, 7 aa, synthetic construct
GGPGSAW

SEQ ID NO: 39865 - protein, 7 aa, synthetic construct
CKADSKE

SEQ ID NO: 39866 - protein, 7 aa, synthetic construct
LEPKCKG

SEQ ID NO: 39867 - protein, 7 aa, synthetic construct
VEGVLCR

SEQ ID NO: 39868 - protein, 7 aa, synthetic construct
YFHGQMD

SEQ ID NO: 39869 - protein, 7 aa, synthetic construct
REESSRW

SEQ ID NO: 39870 - protein, 7 aa, synthetic construct
FWSGIPA

SEQ ID NO: 39871 - protein, 7 aa, synthetic construct
CNFKGPP

SEQ ID NO: 39872 - protein, 7 aa, synthetic construct
REDAIRW

SEQ ID NO: 39873 - protein, 7 aa, synthetic construct
KYESSVW

SEQ ID NO: 39874 - protein, 7 aa, synthetic construct
YTGTSCL

SEQ ID NO: 39875 - protein, 7 aa, synthetic construct
PYARSPS

SEQ ID NO: 39876 - protein, 7 aa, synthetic construct
CAAERLG

SEQ ID NO: 39877 - protein, 7 aa, synthetic construct
IESYNGR

SEQ ID NO: 39878 - protein, 7 aa, synthetic construct
YARGSCD

SEQ ID NO: 39879 - protein, 7 aa, synthetic construct
YWSQIKD

SEQ ID NO: 39880 - protein, 7 aa, synthetic construct
YYHGIQA

SEQ ID NO: 39881 - protein, 7 aa, synthetic construct
RNEFTVY

SEQ ID NO: 39882 - protein, 7 aa, synthetic construct
RDDYQYY

SEQ ID NO: 39883 - protein, 7 aa, synthetic construct
CKPPKLE

SEQ ID NO: 39884 - protein, 7 aa, synthetic construct
REDTSYW

SEQ ID NO: 39885 - protein, 7 aa, synthetic construct
RNEFTSF

SEQ ID NO: 39886 - protein, 7 aa, synthetic construct
CKSTNGI

SEQ ID NO: 39887 - protein, 7 aa, synthetic construct
FCKSNAN

SEQ ID NO: 39888 - protein, 7 aa, synthetic construct
SYAFSRE

SEQ ID NO: 39889 - protein, 7 aa, synthetic construct
DYADRKW

SEQ ID NO: 39890 - protein, 7 aa, synthetic construct
GDGRSHW

SEQ ID NO: 39891 - protein, 7 aa, synthetic construct
FFSGQRE

SEQ ID NO: 39892 - protein, 7 aa, synthetic construct
YWSGTNA

SEQ ID NO: 39893 - protein, 7 aa, synthetic construct
NDATSKW

SEQ ID NO: 39894 - protein, 7 aa, synthetic construct
REDVVYW

SEQ ID NO: 39895 - protein, 7 aa, synthetic construct
LREGECK

SEQ ID NO: 39896 - protein, 7 aa, synthetic construct
CRSRVDE

SEQ ID NO: 39897 - protein, 7 aa, synthetic construct
FFHGKIE

SEQ ID NO: 39898 - protein, 7 aa, synthetic construct
CKPHRLE

SEQ ID NO: 39899 - protein, 7 aa, synthetic construct
RSEYHTY

SEQ ID NO: 39900 - protein, 7 aa, synthetic construct
YFSAVRA

SEQ ID NO: 39901 - protein, 7 aa, synthetic construct
CKHQQVE

SEQ ID NO: 39902 - protein, 7 aa, synthetic construct
YYTGMVN

SEQ ID NO: 39903 - protein, 7 aa, synthetic construct
YKADAPC

SEQ ID NO: 39904 - protein, 7 aa, synthetic construct
IQFSPLD

SEQ ID NO: 39905 - protein, 7 aa, synthetic construct
TSSGGCQ

SEQ ID NO: 39906 - protein, 7 aa, synthetic construct
CKPRQPE

SEQ ID NO: 39907 - protein, 7 aa, synthetic construct
CGGGKAP

SEQ ID NO: 39908 - protein, 7 aa, synthetic construct
CKPPSGI

SEQ ID NO: 39909 - protein, 7 aa, synthetic construct
CKEGTRM

SEQ ID NO: 39910 - protein, 7 aa, synthetic construct
CRPGSPG

SEQ ID NO: 39911 - protein, 7 aa, synthetic construct
CKPEMRP

SEQ ID NO: 39912 - protein, 7 aa, synthetic construct
GSETSMW

SEQ ID NO: 39913 - protein, 7 aa, synthetic construct
VGMRCPP

SEQ ID NO: 39914 - protein, 7 aa, synthetic construct
RGGDRSW

SEQ ID NO: 39915 - protein, 7 aa, synthetic construct
RTYTEFP

SEQ ID NO: 39916 - protein, 7 aa, synthetic construct
YFQGIHA

SEQ ID NO: 39917 - protein, 7 aa, synthetic construct
MCRPCSE

SEQ ID NO: 39918 - protein, 7 aa, synthetic construct
STPMCKA

SEQ ID NO: 39919 - protein, 7 aa, synthetic construct
FFSGVQA

SEQ ID NO: 39920 - protein, 7 aa, synthetic construct
RNATSAW

SEQ ID NO: 39921 - protein, 7 aa, synthetic construct
KDALKCT

SEQ ID NO: 39922 - protein, 7 aa, synthetic construct
YFTGMIQ

SEQ ID NO: 39923 - protein, 7 aa, synthetic construct
GKGSCEQ

SEQ ID NO: 39924 - protein, 7 aa, synthetic construct
YWTKIPE

SEQ ID NO: 39925 - protein, 7 aa, synthetic construct
CAPDYVE

SEQ ID NO: 39926 - protein, 7 aa, synthetic construct
VKTDRCA

SEQ ID NO: 39927 - protein, 7 aa, synthetic construct
YSRISGN

SEQ ID NO: 39928 - protein, 7 aa, synthetic construct
YFSGIHT

SEQ ID NO: 39929 - protein, 7 aa, synthetic construct
CKDDSRA

SEQ ID NO: 39930 - protein, 7 aa, synthetic construct
RTPTCAG

SEQ ID NO: 39931 - protein, 7 aa, synthetic construct
CAPYLVE

SEQ ID NO: 39932 - protein, 7 aa, synthetic construct
YTRLDFD

SEQ ID NO: 39933 - protein, 7 aa, synthetic construct
YWQGIPA

SEQ ID NO: 39934 - protein, 7 aa, synthetic construct
YFHGKIV

SEQ ID NO: 39935 - protein, 7 aa, synthetic construct
WARGCDN

SEQ ID NO: 39936 - protein, 7 aa, synthetic construct
YWTGRQE

SEQ ID NO: 39937 - protein, 7 aa, synthetic construct
YWTGKPE

SEQ ID NO: 39938 - protein, 7 aa, synthetic construct
YWTGKAD

SEQ ID NO: 39939 - protein, 7 aa, synthetic construct
YFQGRLE

SEQ ID NO: 39940 - protein, 7 aa, synthetic construct
CSKEHIP

SEQ ID NO: 39941 - protein, 7 aa, synthetic construct
VSEFQTY

SEQ ID NO: 39942 - protein, 7 aa, synthetic construct
LARLGWD

SEQ ID NO: 39943 - protein, 7 aa, synthetic construct
WSPMCKA

SEQ ID NO: 39944 - protein, 7 aa, synthetic construct
YYTGIPH

SEQ ID NO: 39945 - protein, 7 aa, synthetic construct
YFSGRAQ

SEQ ID NO: 39946 - protein, 7 aa, synthetic construct
KFDNCGS

SEQ ID NO: 39947 - protein, 7 aa, synthetic construct
MDGTSLW

SEQ ID NO: 39948 - protein, 7 aa, synthetic construct
YFSGQNN

SEQ ID NO: 39949 - protein, 7 aa, synthetic construct
YFAGQIA

SEQ ID NO: 39950 - protein, 7 aa, synthetic construct
FFTGTVD

SEQ ID NO: 39951 - protein, 7 aa, synthetic construct
DLESYKW

SEQ ID NO: 39952 - protein, 7 aa, synthetic construct
FFTGRLD

SEQ ID NO: 39953 - protein, 7 aa, synthetic construct
CKPRSIE

SEQ ID NO: 39954 - protein, 7 aa, synthetic construct
IMQDRSW

SEQ ID NO: 39955 - protein, 7 aa, synthetic construct
CTSKTGN

SEQ ID NO: 39956 - protein, 7 aa, synthetic construct
MLTGKCE

SEQ ID NO: 39957 - protein, 7 aa, synthetic construct
YWHGVTE

SEQ ID NO: 39958 - protein, 7 aa, synthetic construct
CERKTDA

SEQ ID NO: 39959 - protein, 7 aa, synthetic construct
CAPTYRE

SEQ ID NO: 39960 - protein, 7 aa, synthetic construct
KDGYTVY

SEQ ID NO: 39961 - protein, 7 aa, synthetic construct
CRDVKQG

SEQ ID NO: 39962 - protein, 7 aa, synthetic construct
FFTGFID

SEQ ID NO: 39963 - protein, 7 aa, synthetic construct
RTLETFP

SEQ ID NO: 39964 - protein, 7 aa, synthetic construct
YFSGKAL

SEQ ID NO: 39965 - protein, 7 aa, synthetic construct
YSRIGPS

SEQ ID NO: 39966 - protein, 7 aa, synthetic construct
KDDYTSF

SEQ ID NO: 39967 - protein, 7 aa, synthetic construct
FCRPCPV

SEQ ID NO: 39968 - protein, 7 aa, synthetic construct
YYTGVRD

SEQ ID NO: 39969 - protein, 7 aa, synthetic construct
CAPYLHA

SEQ ID NO: 39970 - protein, 7 aa, synthetic construct
CKKLGPD

SEQ ID NO: 39971 - protein, 7 aa, synthetic construct
LCKPPLT

SEQ ID NO: 39972 - protein, 7 aa, synthetic construct
FFSGITE

SEQ ID NO: 39973 - protein, 7 aa, synthetic construct
WTPMCQA

SEQ ID NO: 39974 - protein, 7 aa, synthetic construct
CRPDVVG

SEQ ID NO: 39975 - protein, 7 aa, synthetic construct
TSECVKY

SEQ ID NO: 39976 - protein, 7 aa, synthetic construct
GSETSKW

SEQ ID NO: 39977 - protein, 7 aa, synthetic construct
YWTGKQD

SEQ ID NO: 39978 - protein, 7 aa, synthetic construct
RDGSSGW

SEQ ID NO: 39979 - protein, 7 aa, synthetic construct
YWSGQRE

SEQ ID NO: 39980 - protein, 7 aa, synthetic construct
APDTVRW

SEQ ID NO: 39981 - protein, 7 aa, synthetic construct
VGYDRGW

SEQ ID NO: 39982 - protein, 7 aa, synthetic construct
CKPGSPH

SEQ ID NO: 39983 - protein, 7 aa, synthetic construct
YWSGTTS

SEQ ID NO: 39984 - protein, 7 aa, synthetic construct
CAPSYRE

SEQ ID NO: 39985 - protein, 7 aa, synthetic construct
REYDSFP

SEQ ID NO: 39986 - protein, 7 aa, synthetic construct
KDDFMTY

SEQ ID NO: 39987 - protein, 7 aa, synthetic construct
MTGGSCL

SEQ ID NO: 39988 - protein, 7 aa, synthetic construct
RNEFQSY

SEQ ID NO: 39989 - protein, 7 aa, synthetic construct
REQTVHW

SEQ ID NO: 39990 - protein, 7 aa, synthetic construct
WLKRQDC

SEQ ID NO: 39991 - protein, 7 aa, synthetic construct
GCRMGDI

SEQ ID NO: 39992 - protein, 7 aa, synthetic construct
WWAGVKG

SEQ ID NO: 39993 - protein, 7 aa, synthetic construct
YYTGMRD

SEQ ID NO: 39994 - protein, 7 aa, synthetic construct
YFAGQVA

SEQ ID NO: 39995 - protein, 7 aa, synthetic construct
GLPTRCP

SEQ ID NO: 39996 - protein, 7 aa, synthetic construct
YFSAVRE

SEQ ID NO: 39997 - protein, 7 aa, synthetic construct
RDEGTYW

SEQ ID NO: 39998 - protein, 7 aa, synthetic construct
CAKDYRE

SEQ ID NO: 39999 - protein, 7 aa, synthetic construct
YWSGKTE

SEQ ID NO: 40000 - protein, 7 aa, synthetic construct
CKLPKSE

SEQ ID NO: 40001 - protein, 7 aa, synthetic construct
CGKGGPV

SEQ ID NO: 40002 - protein, 7 aa, synthetic construct
QMQDRSW

SEQ ID NO: 40003 - protein, 7 aa, synthetic construct
YHKNNAN

SEQ ID NO: 40004 - protein, 7 aa, synthetic construct
GGPGSVW

SEQ ID NO: 40005 - protein, 7 aa, synthetic construct
LSRASID

SEQ ID NO: 40006 - protein, 7 aa, synthetic construct
YWSGKHE

SEQ ID NO: 40007 - protein, 7 aa, synthetic construct
YYSGVIM

SEQ ID NO: 40008 - protein, 7 aa, synthetic construct
RDEFQTY

SEQ ID NO: 40009 - protein, 7 aa, synthetic construct
AGYDRHW

SEQ ID NO: 40010 - protein, 7 aa, synthetic construct
RNEFTSY

SEQ ID NO: 40011 - protein, 7 aa, synthetic construct
NGTNGRW

SEQ ID NO: 40012 - protein, 7 aa, synthetic construct
IDGKAGC

SEQ ID NO: 40013 - protein, 7 aa, synthetic construct
CKGESRS

SEQ ID NO: 40014 - protein, 7 aa, synthetic construct
CKSLKSP

SEQ ID NO: 40015 - protein, 7 aa, synthetic construct
CAPDYQE

SEQ ID NO: 40016 - protein, 7 aa, synthetic construct
CKPPPLP

SEQ ID NO: 40017 - protein, 7 aa, synthetic construct
YYTGIQE

SEQ ID NO: 40018 - protein, 7 aa, synthetic construct
PGSTRTW

SEQ ID NO: 40019 - protein, 7 aa, synthetic construct
SMQSRSW

SEQ ID NO: 40020 - protein, 7 aa, synthetic construct
MTGTSCQ

SEQ ID NO: 40021 - protein, 7 aa, synthetic construct
CAPYRHE

SEQ ID NO: 40022 - protein, 7 aa, synthetic construct
CKSDKIM

SEQ ID NO: 40023 - protein, 7 aa, synthetic construct
CRAEDKG

SEQ ID NO: 40024 - protein, 7 aa, synthetic construct
CVKDEGA

SEQ ID NO: 40025 - protein, 7 aa, synthetic construct
REGASYW

SEQ ID NO: 40026 - protein, 7 aa, synthetic construct
YWSGKQA

SEQ ID NO: 40027 - protein, 7 aa, synthetic construct
LKYSGMC

SEQ ID NO: 40028 - protein, 7 aa, synthetic construct
RDEFHVW

SEQ ID NO: 40029 - protein, 7 aa, synthetic construct
YWTGTTE

SEQ ID NO: 40030 - protein, 7 aa, synthetic construct
CRNGQPA

SEQ ID NO: 40031 - protein, 7 aa, synthetic construct
CRDENKP

SEQ ID NO: 40032 - protein, 7 aa, synthetic construct
YFAGRTS

SEQ ID NO: 40033 - protein, 7 aa, synthetic construct
FFTGKVS

SEQ ID NO: 40034 - protein, 7 aa, synthetic construct
YVRSDAG

SEQ ID NO: 40035 - protein, 7 aa, synthetic construct
CKPGEGA

SEQ ID NO: 40036 - protein, 7 aa, synthetic construct
QGESRVW

SEQ ID NO: 40037 - protein, 7 aa, synthetic construct
RLESAGW

SEQ ID NO: 40038 - protein, 7 aa, synthetic construct
CKPPMGA

SEQ ID NO: 40039 - protein, 7 aa, synthetic construct
RDGESKW

SEQ ID NO: 40040 - protein, 7 aa, synthetic construct
CKTKSQE

SEQ ID NO: 40041 - protein, 7 aa, synthetic construct
HARQSPN

SEQ ID NO: 40042 - protein, 7 aa, synthetic construct
CMSRAVA

SEQ ID NO: 40043 - protein, 7 aa, synthetic construct
YWSAVTA

SEQ ID NO: 40044 - protein, 7 aa, synthetic construct
CREGTSS

SEQ ID NO: 40045 - protein, 7 aa, synthetic construct
YWEGVKA

SEQ ID NO: 40046 - protein, 7 aa, synthetic construct
VMPSAVW

SEQ ID NO: 40047 - protein, 7 aa, synthetic construct
FKSTNGV

SEQ ID NO: 40048 - protein, 7 aa, synthetic construct
YYSGIQS

SEQ ID NO: 40049 - protein, 7 aa, synthetic construct
WSAITDC

SEQ ID NO: 40050 - protein, 7 aa, synthetic construct
LHKLSTH

SEQ ID NO: 40051 - protein, 7 aa, synthetic construct
KPDHVRW

SEQ ID NO: 40052 - protein, 7 aa, synthetic construct
YSKLGAD

SEQ ID NO: 40053 - protein, 7 aa, synthetic construct
RTYDTYP

SEQ ID NO: 40054 - protein, 7 aa, synthetic construct
YFSGVRT

SEQ ID NO: 40055 - protein, 7 aa, synthetic construct
DMLSSSW

SEQ ID NO: 40056 - protein, 7 aa, synthetic construct
CKPQWPS

SEQ ID NO: 40057 - protein, 7 aa, synthetic construct
CKPDSIG

SEQ ID NO: 40058 - protein, 7 aa, synthetic construct
MTGTSCL

SEQ ID NO: 40059 - protein, 7 aa, synthetic construct
YLKSQSI

SEQ ID NO: 40060 - protein, 7 aa, synthetic construct
CTEKTGH

SEQ ID NO: 40061 - protein, 7 aa, synthetic construct
GSEFSAF

SEQ ID NO: 40062 - protein, 7 aa, synthetic construct
KMDYSVF

SEQ ID NO: 40063 - protein, 7 aa, synthetic construct
YFTGTQL

SEQ ID NO: 40064 - protein, 7 aa, synthetic construct
KEDYVTY

SEQ ID NO: 40065 - protein, 7 aa, synthetic construct
YSRICPN

SEQ ID NO: 40066 - protein, 7 aa, synthetic construct
YWSGQIA

SEQ ID NO: 40067 - protein, 7 aa, synthetic construct
RTYETFP

SEQ ID NO: 40068 - protein, 7 aa, synthetic construct
RDYDSYP

SEQ ID NO: 40069 - protein, 7 aa, synthetic construct
YYTGFVD

SEQ ID NO: 40070 - protein, 7 aa, synthetic construct
FWHGVPD

SEQ ID NO: 40071 - protein, 7 aa, synthetic construct
RGESSSW

SEQ ID NO: 40072 - protein, 7 aa, synthetic construct
RSEFRTY

SEQ ID NO: 40073 - protein, 7 aa, synthetic construct
YWTGCME

SEQ ID NO: 40074 - protein, 7 aa, synthetic construct
WPSGSAG

SEQ ID NO: 40075 - protein, 7 aa, synthetic construct
YFTGCQA

SEQ ID NO: 40076 - protein, 7 aa, synthetic construct
GEPTCKA

SEQ ID NO: 40077 - protein, 7 aa, synthetic construct
YHRLNEH

SEQ ID NO: 40078 - protein, 7 aa, synthetic construct
GGEGTRW

SEQ ID NO: 40079 - protein, 7 aa, synthetic construct
CKPDAVR

SEQ ID NO: 40080 - protein, 7 aa, synthetic construct
MTGTSCR

SEQ ID NO: 40081 - protein, 7 aa, synthetic construct
LHKLCQD

SEQ ID NO: 40082 - protein, 7 aa, synthetic construct
YFSGLID

SEQ ID NO: 40083 - protein, 7 aa, synthetic construct
VMEARQW

SEQ ID NO: 40084 - protein, 7 aa, synthetic construct
YWGGIPD

SEQ ID NO: 40085 - protein, 7 aa, synthetic construct
LARTGND

SEQ ID NO: 40086 - protein, 7 aa, synthetic construct
GLASSTW

SEQ ID NO: 40087 - protein, 7 aa, synthetic construct
CKSSCKP

SEQ ID NO: 40088 - protein, 7 aa, synthetic construct
CKLSSKA

SEQ ID NO: 40089 - protein, 7 aa, synthetic construct
LTRLNPD

SEQ ID NO: 40090 - protein, 7 aa, synthetic construct
WTPICKA

SEQ ID NO: 40091 - protein, 7 aa, synthetic construct
KTEFCAA

SEQ ID NO: 40092 - protein, 7 aa, synthetic construct
YYSGVIS

SEQ ID NO: 40093 - protein, 7 aa, synthetic construct
KDDFLTW

SEQ ID NO: 40094 - protein, 7 aa, synthetic construct
CKAVAPP

SEQ ID NO: 40095 - protein, 7 aa, synthetic construct
FWSGVSE

SEQ ID NO: 40096 - protein, 7 aa, synthetic construct
FNSTNGR

SEQ ID NO: 40097 - protein, 7 aa, synthetic construct
CKPQMGT

SEQ ID NO: 40098 - protein, 7 aa, synthetic construct
YWTGTLE

SEQ ID NO: 40099 - protein, 7 aa, synthetic construct
YWTGQVA

SEQ ID NO: 40100 - protein, 7 aa, synthetic construct
AMESSNW

SEQ ID NO: 40101 - protein, 7 aa, synthetic construct
WQPMCKA

SEQ ID NO: 40102 - protein, 7 aa, synthetic construct
VGSDRGW

SEQ ID NO: 40103 - protein, 7 aa, synthetic construct
YFSAVKE

SEQ ID NO: 40104 - protein, 7 aa, synthetic construct
CPKTKLE

SEQ ID NO: 40105 - protein, 7 aa, synthetic construct
KNDYLIY

SEQ ID NO: 40106 - protein, 7 aa, synthetic construct
RRDGTPA

SEQ ID NO: 40107 - protein, 7 aa, synthetic construct
CKPSPLT

SEQ ID NO: 40108 - protein, 7 aa, synthetic construct
FSKICKE

SEQ ID NO: 40109 - protein, 7 aa, synthetic construct
CKPQMPS

SEQ ID NO: 40110 - protein, 7 aa, synthetic construct
YFSGTIR

SEQ ID NO: 40111 - protein, 7 aa, synthetic construct
CNKPMAA

SEQ ID NO: 40112 - protein, 7 aa, synthetic construct
WLKEKMC

SEQ ID NO: 40113 - protein, 7 aa, synthetic construct
GCGTMCG

SEQ ID NO: 40114 - protein, 7 aa, synthetic construct
CRSGPTP

SEQ ID NO: 40115 - protein, 7 aa, synthetic construct
CSRNSDN

SEQ ID NO: 40116 - protein, 7 aa, synthetic construct
IDKLCKP

SEQ ID NO: 40117 - protein, 7 aa, synthetic construct
CRAQTLD

SEQ ID NO: 40118 - protein, 7 aa, synthetic construct
CKPGQQS

SEQ ID NO: 40119 - protein, 7 aa, synthetic construct
ILSSQAW

SEQ ID NO: 40120 - protein, 7 aa, synthetic construct
YSCNSDN

SEQ ID NO: 40121 - protein, 7 aa, synthetic construct
GKSGCCS

SEQ ID NO: 40122 - protein, 7 aa, synthetic construct
DQEIKRR

SEQ ID NO: 40123 - protein, 7 aa, synthetic construct
VSTHDCA

SEQ ID NO: 40124 - protein, 7 aa, synthetic construct
CAKSARE

SEQ ID NO: 40125 - protein, 7 aa, synthetic construct
YLKSNPY

SEQ ID NO: 40126 - protein, 7 aa, synthetic construct
MTGTSCM

SEQ ID NO: 40127 - protein, 7 aa, synthetic construct
CKPQHGG

SEQ ID NO: 40128 - protein, 7 aa, synthetic construct
YERGCKE

SEQ ID NO: 40129 - protein, 7 aa, synthetic construct
GGEYVSY

SEQ ID NO: 40130 - protein, 7 aa, synthetic construct
KDEWRPF

SEQ ID NO: 40131 - protein, 7 aa, synthetic construct
WFTGRID

SEQ ID NO: 40132 - protein, 7 aa, synthetic construct
KDDFVVW

SEQ ID NO: 40133 - protein, 7 aa, synthetic construct
GCKPLCV

SEQ ID NO: 40134 - protein, 7 aa, synthetic construct
YSRLSDY

SEQ ID NO: 40135 - protein, 7 aa, synthetic construct
YYTGVQA

SEQ ID NO: 40136 - protein, 7 aa, synthetic construct
CNKDMTA

SEQ ID NO: 40137 - protein, 7 aa, synthetic construct
CMKPRLE

SEQ ID NO: 40138 - protein, 7 aa, synthetic construct
GCRHGDV

SEQ ID NO: 40139 - protein, 7 aa, synthetic construct
WWSGTAA

SEQ ID NO: 40140 - protein, 7 aa, synthetic construct
WTPACKA

SEQ ID NO: 40141 - protein, 7 aa, synthetic construct
RTYEVYP

SEQ ID NO: 40142 - protein, 7 aa, synthetic construct
RDQYSTY

SEQ ID NO: 40143 - protein, 7 aa, synthetic construct
GDDFVRW

SEQ ID NO: 40144 - protein, 7 aa, synthetic construct
YYSGRID

SEQ ID NO: 40145 - protein, 7 aa, synthetic construct
CAPFLHE

SEQ ID NO: 40146 - protein, 7 aa, synthetic construct
EPQSRHW

SEQ ID NO: 40147 - protein, 7 aa, synthetic construct
GCGTKAG

SEQ ID NO: 40148 - protein, 7 aa, synthetic construct
RMESADW

SEQ ID NO: 40149 - protein, 7 aa, synthetic construct
FYEGKPC

SEQ ID NO: 40150 - protein, 7 aa, synthetic construct
CNKPMTV

SEQ ID NO: 40151 - protein, 7 aa, synthetic construct
REQEVRW

SEQ ID NO: 40152 - protein, 7 aa, synthetic construct
CKGSKEQ

SEQ ID NO: 40153 - protein, 7 aa, synthetic construct
YFSGTVY

SEQ ID NO: 40154 - protein, 7 aa, synthetic construct
CRGDNGV

SEQ ID NO: 40155 - protein, 7 aa, synthetic construct
RTPTCPP

SEQ ID NO: 40156 - protein, 7 aa, synthetic construct
RDSYSTY

SEQ ID NO: 40157 - protein, 7 aa, synthetic construct
MTGTSCW

SEQ ID NO: 40158 - protein, 7 aa, synthetic construct
SANTGRC

SEQ ID NO: 40159 - protein, 7 aa, synthetic construct
GCVVKPE

SEQ ID NO: 40160 - protein, 7 aa, synthetic construct
LKDGTNA

SEQ ID NO: 40161 - protein, 7 aa, synthetic construct
YYTGHLD

SEQ ID NO: 40162 - protein, 7 aa, synthetic construct
YFSGQSA

SEQ ID NO: 40163 - protein, 7 aa, synthetic construct
YFAGVMN

SEQ ID NO: 40164 - protein, 7 aa, synthetic construct
CREGTRA

SEQ ID NO: 40165 - protein, 7 aa, synthetic construct
REPGCKE

SEQ ID NO: 40166 - protein, 7 aa, synthetic construct
GSIGVAW

SEQ ID NO: 40167 - protein, 7 aa, synthetic construct
REDHTYW

SEQ ID NO: 40168 - protein, 7 aa, synthetic construct
YFPGCKE

SEQ ID NO: 40169 - protein, 7 aa, synthetic construct
NALEGKD

SEQ ID NO: 40170 - protein, 7 aa, synthetic construct
YFSGRHD

SEQ ID NO: 40171 - protein, 7 aa, synthetic construct
GCRHGGI

SEQ ID NO: 40172 - protein, 7 aa, synthetic construct
RDEFVMF

SEQ ID NO: 40173 - protein, 7 aa, synthetic construct
KWDSATW

SEQ ID NO: 40174 - protein, 7 aa, synthetic construct
KLESVVW

SEQ ID NO: 40175 - protein, 7 aa, synthetic construct
CKPPMPP

SEQ ID NO: 40176 - protein, 7 aa, synthetic construct
CRPGTPG

SEQ ID NO: 40177 - protein, 7 aa, synthetic construct
CTSDTGH

SEQ ID NO: 40178 - protein, 7 aa, synthetic construct
YVRSNAN

SEQ ID NO: 40179 - protein, 7 aa, synthetic construct
GADGVRW

SEQ ID NO: 40180 - protein, 7 aa, synthetic construct
YFKGKCE

SEQ ID NO: 40181 - protein, 7 aa, synthetic construct
DRGGCPR

SEQ ID NO: 40182 - protein, 7 aa, synthetic construct
IPSSSLW

SEQ ID NO: 40183 - protein, 7 aa, synthetic construct
YWSGMPE

SEQ ID NO: 40184 - protein, 7 aa, synthetic construct
CGGGKTP

SEQ ID NO: 40185 - protein, 7 aa, synthetic construct
FIKHDTK

SEQ ID NO: 40186 - protein, 7 aa, synthetic construct
CNKPYTA

SEQ ID NO: 40187 - protein, 7 aa, synthetic construct
WMKGACA

SEQ ID NO: 40188 - protein, 7 aa, synthetic construct
YWSGMNA

SEQ ID NO: 40189 - protein, 7 aa, synthetic construct
YVRSQQS

SEQ ID NO: 40190 - protein, 7 aa, synthetic construct
RDAFTVY

SEQ ID NO: 40191 - protein, 7 aa, synthetic construct
YEMGCKE

SEQ ID NO: 40192 - protein, 7 aa, synthetic construct
SMQDRGW

SEQ ID NO: 40193 - protein, 7 aa, synthetic construct
KNDSATC

SEQ ID NO: 40194 - protein, 7 aa, synthetic construct
CAKVGVP

SEQ ID NO: 40195 - protein, 7 aa, synthetic construct
MTGTSCI

SEQ ID NO: 40196 - protein, 7 aa, synthetic construct
RSPDAYP

SEQ ID NO: 40197 - protein, 7 aa, synthetic construct
CMKKSET

SEQ ID NO: 40198 - protein, 7 aa, synthetic construct
IPHRSCA

SEQ ID NO: 40199 - protein, 7 aa, synthetic construct
CMPGAVE

SEQ ID NO: 40200 - protein, 7 aa, synthetic construct
CRSTPGM

SEQ ID NO: 40201 - protein, 7 aa, synthetic construct
YLPGCKE

SEQ ID NO: 40202 - protein, 7 aa, synthetic construct
KDGSCKA

SEQ ID NO: 40203 - protein, 7 aa, synthetic construct
CREGTPP

SEQ ID NO: 40204 - protein, 7 aa, synthetic construct
YWGGVAA

SEQ ID NO: 40205 - protein, 7 aa, synthetic construct
YLKNDPT

SEQ ID NO: 40206 - protein, 7 aa, synthetic construct
YSRIHPN

SEQ ID NO: 40207 - protein, 7 aa, synthetic construct
CKELKMD

SEQ ID NO: 40208 - protein, 7 aa, synthetic construct
WWSQVRE

SEQ ID NO: 40209 - protein, 7 aa, synthetic construct
YGRGCCG

SEQ ID NO: 40210 - protein, 7 aa, synthetic construct
YFSGEIA

SEQ ID NO: 40211 - protein, 7 aa, synthetic construct
TWDGQNA

SEQ ID NO: 40212 - protein, 7 aa, synthetic construct
CKGSGEQ

SEQ ID NO: 40213 - protein, 7 aa, synthetic construct
CKPRCCE

SEQ ID NO: 40214 - protein, 7 aa, synthetic construct
CKPEAFP

SEQ ID NO: 40215 - protein, 7 aa, synthetic construct
FFSGRID

SEQ ID NO: 40216 - protein, 7 aa, synthetic construct
YYTGRHD

SEQ ID NO: 40217 - protein, 7 aa, synthetic construct
YFTGNRD

SEQ ID NO: 40218 - protein, 7 aa, synthetic construct
CNKPMTM

SEQ ID NO: 40219 - protein, 7 aa, synthetic construct
YFHGVQD

SEQ ID NO: 40220 - protein, 7 aa, synthetic construct
YSRIGPF

SEQ ID NO: 40221 - protein, 7 aa, synthetic construct
CKSDTRW

SEQ ID NO: 40222 - protein, 7 aa, synthetic construct
REEIVRW

SEQ ID NO: 40223 - protein, 7 aa, synthetic construct
WWSEIRE

SEQ ID NO: 40224 - protein, 7 aa, synthetic construct
HPSKCPP

SEQ ID NO: 40225 - protein, 7 aa, synthetic construct
MQGTSCL

SEQ ID NO: 40226 - protein, 7 aa, synthetic construct
RDKTEGC

SEQ ID NO: 40227 - protein, 7 aa, synthetic construct
CKLDKDD

SEQ ID NO: 40228 - protein, 7 aa, synthetic construct
CADRKQG

SEQ ID NO: 40229 - protein, 7 aa, synthetic construct
CRPQTPS

SEQ ID NO: 40230 - protein, 7 aa, synthetic construct
KDDFVYF

SEQ ID NO: 40231 - protein, 7 aa, synthetic construct
AGYDRLW

SEQ ID NO: 40232 - protein, 7 aa, synthetic construct
HGKAQCV

SEQ ID NO: 40233 - protein, 7 aa, synthetic construct
EMGSSNW

SEQ ID NO: 40234 - protein, 7 aa, synthetic construct
YYTGQTE

SEQ ID NO: 40235 - protein, 7 aa, synthetic construct
IADGLRW

SEQ ID NO: 40236 - protein, 7 aa, synthetic construct
CREMGVG

SEQ ID NO: 40237 - protein, 7 aa, synthetic construct
YVRSGTN

SEQ ID NO: 40238 - protein, 7 aa, synthetic construct
RMDNVFP

SEQ ID NO: 40239 - protein, 7 aa, synthetic construct
CTSKTGD

SEQ ID NO: 40240 - protein, 7 aa, synthetic construct
CKPRPEA

SEQ ID NO: 40241 - protein, 7 aa, synthetic construct
GSEFTSF

SEQ ID NO: 40242 - protein, 7 aa, synthetic construct
LHRLHAD

SEQ ID NO: 40243 - protein, 7 aa, synthetic construct
CRPPMPP

SEQ ID NO: 40244 - protein, 7 aa, synthetic construct
YYTGKLS

SEQ ID NO: 40245 - protein, 7 aa, synthetic construct
WFSGIQE

SEQ ID NO: 40246 - protein, 7 aa, synthetic construct
YWSGMRE

SEQ ID NO: 40247 - protein, 7 aa, synthetic construct
REPHCCG

SEQ ID NO: 40248 - protein, 7 aa, synthetic construct
QMEDRAW

SEQ ID NO: 40249 - protein, 7 aa, synthetic construct
CHKPMTA

SEQ ID NO: 40250 - protein, 7 aa, synthetic construct
YHRIGTN

SEQ ID NO: 40251 - protein, 7 aa, synthetic construct
CVVRSAG

SEQ ID NO: 40252 - protein, 7 aa, synthetic construct
PCKPQPM

SEQ ID NO: 40253 - protein, 7 aa, synthetic construct
LHKLCED

SEQ ID NO: 40254 - protein, 7 aa, synthetic construct
FFTGMRE

SEQ ID NO: 40255 - protein, 7 aa, synthetic construct
CKDATRM

SEQ ID NO: 40256 - protein, 7 aa, synthetic construct
CGGGRQT

SEQ ID NO: 40257 - protein, 7 aa, synthetic construct
CLPTHCG

SEQ ID NO: 40258 - protein, 7 aa, synthetic construct
YFSGVNR

SEQ ID NO: 40259 - protein, 7 aa, synthetic construct
CNMPMTA

SEQ ID NO: 40260 - protein, 7 aa, synthetic construct
YHRLGEP

SEQ ID NO: 40261 - protein, 7 aa, synthetic construct
AGFDRGW

SEQ ID NO: 40262 - protein, 7 aa, synthetic construct
REYEVFP

SEQ ID NO: 40263 - protein, 7 aa, synthetic construct
CDKAPKE

SEQ ID NO: 40264 - protein, 7 aa, synthetic construct
KHDYCAP

SEQ ID NO: 40265 - protein, 7 aa, synthetic construct
CRPTCKP

SEQ ID NO: 40266 - protein, 7 aa, synthetic construct
CTIKTGH

SEQ ID NO: 40267 - protein, 7 aa, synthetic construct
CKPEATW

SEQ ID NO: 40268 - protein, 7 aa, synthetic construct
YSRMSDN

SEQ ID NO: 40269 - protein, 7 aa, synthetic construct
CERVGPT

SEQ ID NO: 40270 - protein, 7 aa, synthetic construct
CKSRSLD

SEQ ID NO: 40271 - protein, 7 aa, synthetic construct
IPERCCK

SEQ ID NO: 40272 - protein, 7 aa, synthetic construct
KYARSSE

SEQ ID NO: 40273 - protein, 7 aa, synthetic construct
YWSNVKD

SEQ ID NO: 40274 - protein, 7 aa, synthetic construct
YFSGLRA

SEQ ID NO: 40275 - protein, 7 aa, synthetic construct
WFSGITE

SEQ ID NO: 40276 - protein, 7 aa, synthetic construct
CGKIPPP

SEQ ID NO: 40277 - protein, 7 aa, synthetic construct
YFHGLTA

SEQ ID NO: 40278 - protein, 7 aa, synthetic construct
YSRKSDN

SEQ ID NO: 40279 - protein, 7 aa, synthetic construct
GGPSCKP

SEQ ID NO: 40280 - protein, 7 aa, synthetic construct
CNQNNKP

SEQ ID NO: 40281 - protein, 7 aa, synthetic construct
CKVKMPP

SEQ ID NO: 40282 - protein, 7 aa, synthetic construct
WVRSDVR

SEQ ID NO: 40283 - protein, 7 aa, synthetic construct
YFHGRHD

SEQ ID NO: 40284 - protein, 7 aa, synthetic construct
YWSGRAD

SEQ ID NO: 40285 - protein, 7 aa, synthetic construct
SMQDRNW

SEQ ID NO: 40286 - protein, 7 aa, synthetic construct
CKLGNVS

SEQ ID NO: 40287 - protein, 7 aa, synthetic construct
YWSGRND

SEQ ID NO: 40288 - protein, 7 aa, synthetic construct
YYTGQID

SEQ ID NO: 40289 - protein, 7 aa, synthetic construct
HCRPCSE

SEQ ID NO: 40290 - protein, 7 aa, synthetic construct
CKPNSGG

SEQ ID NO: 40291 - protein, 7 aa, synthetic construct
CKGGGAG

SEQ ID NO: 40292 - protein, 7 aa, synthetic construct
FFTGRMD

SEQ ID NO: 40293 - protein, 7 aa, synthetic construct
DLSSLDW

SEQ ID NO: 40294 - protein, 7 aa, synthetic construct
GGGTKCG

SEQ ID NO: 40295 - protein, 7 aa, synthetic construct
FARTGWD

SEQ ID NO: 40296 - protein, 7 aa, synthetic construct
YYTGRTD

SEQ ID NO: 40297 - protein, 7 aa, synthetic construct
YVRSDPM

SEQ ID NO: 40298 - protein, 7 aa, synthetic construct
CKPPMDG

SEQ ID NO: 40299 - protein, 7 aa, synthetic construct
SLADRGW

SEQ ID NO: 40300 - protein, 7 aa, synthetic construct
YVRSGGG

SEQ ID NO: 40301 - protein, 7 aa, synthetic construct
CKPSSPY

SEQ ID NO: 40302 - protein, 7 aa, synthetic construct
CRSRMAE

SEQ ID NO: 40303 - protein, 7 aa, synthetic construct
YFAGKMA

SEQ ID NO: 40304 - protein, 7 aa, synthetic construct
APPEVRW

SEQ ID NO: 40305 - protein, 7 aa, synthetic construct
GFETVRW

SEQ ID NO: 40306 - protein, 7 aa, synthetic construct
YVRSQPQ

SEQ ID NO: 40307 - protein, 7 aa, synthetic construct
LDDWTGF

SEQ ID NO: 40308 - protein, 7 aa, synthetic construct
KTPMCKA

SEQ ID NO: 40309 - protein, 7 aa, synthetic construct
WVKSQQC

SEQ ID NO: 40310 - protein, 7 aa, synthetic construct
CKPPPLA

SEQ ID NO: 40311 - protein, 7 aa, synthetic construct
FFSGTRA

SEQ ID NO: 40312 - protein, 7 aa, synthetic construct
CKPVQPE

SEQ ID NO: 40313 - protein, 7 aa, synthetic construct
PCRPCSE

SEQ ID NO: 40314 - protein, 7 aa, synthetic construct
YFQGRHE

SEQ ID NO: 40315 - protein, 7 aa, synthetic construct
GIDVVRW

SEQ ID NO: 40316 - protein, 7 aa, synthetic construct
YVRSGPP

SEQ ID NO: 40317 - protein, 7 aa, synthetic construct
NLNGKAC

SEQ ID NO: 40318 - protein, 7 aa, synthetic construct
YWSAINE

SEQ ID NO: 40319 - protein, 7 aa, synthetic construct
GSNGVRW

SEQ ID NO: 40320 - protein, 7 aa, synthetic construct
TRWGDPA

SEQ ID NO: 40321 - protein, 7 aa, synthetic construct
CRSEVVK

SEQ ID NO: 40322 - protein, 7 aa, synthetic construct
CKPSPLS

SEQ ID NO: 40323 - protein, 7 aa, synthetic construct
YWHGKID

SEQ ID NO: 40324 - protein, 7 aa, synthetic construct
MWDGTYA

SEQ ID NO: 40325 - protein, 7 aa, synthetic construct
YFSGQQS

SEQ ID NO: 40326 - protein, 7 aa, synthetic construct
YSRLDSY

SEQ ID NO: 40327 - protein, 7 aa, synthetic construct
YWSGTAA

SEQ ID NO: 40328 - protein, 7 aa, synthetic construct
GMEHVRW

SEQ ID NO: 40329 - protein, 7 aa, synthetic construct
YFQGKIS

SEQ ID NO: 40330 - protein, 7 aa, synthetic construct
CQKEKME

SEQ ID NO: 40331 - protein, 7 aa, synthetic construct
YSRLSQD

SEQ ID NO: 40332 - protein, 7 aa, synthetic construct
KDDYMYY

SEQ ID NO: 40333 - protein, 7 aa, synthetic construct
YYSGVTA

SEQ ID NO: 40334 - protein, 7 aa, synthetic construct
RDEFNIY

SEQ ID NO: 40335 - protein, 7 aa, synthetic construct
CNYPMTA

SEQ ID NO: 40336 - protein, 7 aa, synthetic construct
WTDGTRY

SEQ ID NO: 40337 - protein, 7 aa, synthetic construct
RELTCPR

SEQ ID NO: 40338 - protein, 7 aa, synthetic construct
CKPRSAE

SEQ ID NO: 40339 - protein, 7 aa, synthetic construct
CKPRSTE

SEQ ID NO: 40340 - protein, 7 aa, synthetic construct
FFSGIQE

SEQ ID NO: 40341 - protein, 7 aa, synthetic construct
KCGKQEG

SEQ ID NO: 40342 - protein, 7 aa, synthetic construct
FFSGQRD

SEQ ID NO: 40343 - protein, 7 aa, synthetic construct
DMRSPMW

SEQ ID NO: 40344 - protein, 7 aa, synthetic construct
NMGDRKW

SEQ ID NO: 40345 - protein, 7 aa, synthetic construct
CANDYRE

SEQ ID NO: 40346 - protein, 7 aa, synthetic construct
CGEKCCP

SEQ ID NO: 40347 - protein, 7 aa, synthetic construct
CREGTSA

SEQ ID NO: 40348 - protein, 7 aa, synthetic construct
CSTNWKS

SEQ ID NO: 40349 - protein, 7 aa, synthetic construct
GGGVVRY

SEQ ID NO: 40350 - protein, 7 aa, synthetic construct
MPCSKTP

SEQ ID NO: 40351 - protein, 7 aa, synthetic construct
FKECSTG

SEQ ID NO: 40352 - protein, 7 aa, synthetic construct
CKPGTWE

SEQ ID NO: 40353 - protein, 7 aa, synthetic construct
IPKGPCA

SEQ ID NO: 40354 - protein, 7 aa, synthetic construct
CKPPVDA

SEQ ID NO: 40355 - protein, 7 aa, synthetic construct
CIKPMTA

SEQ ID NO: 40356 - protein, 7 aa, synthetic construct
VSTHCVA

SEQ ID NO: 40357 - protein, 7 aa, synthetic construct
YHRQNPL

SEQ ID NO: 40358 - protein, 7 aa, synthetic construct
PVDTCRP

SEQ ID NO: 40359 - protein, 7 aa, synthetic construct
CDGSRKA

SEQ ID NO: 40360 - protein, 7 aa, synthetic construct
LHRLCPD

SEQ ID NO: 40361 - protein, 7 aa, synthetic construct
CIMKKLE

SEQ ID NO: 40362 - protein, 7 aa, synthetic construct
GSGTSAW

SEQ ID NO: 40363 - protein, 7 aa, synthetic construct
LKGSCEQ

SEQ ID NO: 40364 - protein, 7 aa, synthetic construct
CTVKTGH

SEQ ID NO: 40365 - protein, 7 aa, synthetic construct
CKLNGPD

SEQ ID NO: 40366 - protein, 7 aa, synthetic construct
CKAVSRD

SEQ ID NO: 40367 - protein, 7 aa, synthetic construct
CKPTMVQ

SEQ ID NO: 40368 - protein, 7 aa, synthetic construct
YFSGTIV

SEQ ID NO: 40369 - protein, 7 aa, synthetic construct
YFSGKTV

SEQ ID NO: 40370 - protein, 7 aa, synthetic construct
YFSGVRG

SEQ ID NO: 40371 - protein, 7 aa, synthetic construct
CNKPMTE

SEQ ID NO: 40372 - protein, 7 aa, synthetic construct
YWQGVVD

SEQ ID NO: 40373 - protein, 7 aa, synthetic construct
CYKPMTA

SEQ ID NO: 40374 - protein, 7 aa, synthetic construct
TQICPDR

SEQ ID NO: 40375 - protein, 7 aa, synthetic construct
YFKTQCD

SEQ ID NO: 40376 - protein, 7 aa, synthetic construct
CNQPMTA

SEQ ID NO: 40377 - protein, 7 aa, synthetic construct
CNKPMTT

SEQ ID NO: 40378 - protein, 7 aa, synthetic construct
YFTNVKE

SEQ ID NO: 40379 - protein, 7 aa, synthetic construct
DMQDRSW

SEQ ID NO: 40380 - protein, 7 aa, synthetic construct
PLKSSLW

SEQ ID NO: 40381 - protein, 7 aa, synthetic construct
AGMDRGW

SEQ ID NO: 40382 - protein, 7 aa, synthetic construct
YADSKTC

SEQ ID NO: 40383 - protein, 7 aa, synthetic construct
CGKRDAD

SEQ ID NO: 40384 - protein, 7 aa, synthetic construct
CPKNQRE

SEQ ID NO: 40385 - protein, 7 aa, synthetic construct
RDEFMSF

SEQ ID NO: 40386 - protein, 7 aa, synthetic construct
MTGTDCL

SEQ ID NO: 40387 - protein, 7 aa, synthetic construct
YFQGQHE

SEQ ID NO: 40388 - protein, 7 aa, synthetic construct
GILTRGS

SEQ ID NO: 40389 - protein, 7 aa, synthetic construct
CKMDGTG

SEQ ID NO: 40390 - protein, 7 aa, synthetic construct
EEPGCKE

SEQ ID NO: 40391 - protein, 7 aa, synthetic construct
YFTGAMD

SEQ ID NO: 40392 - protein, 7 aa, synthetic construct
RALDGFD

SEQ ID NO: 40393 - protein, 7 aa, synthetic construct
GREHVKW

SEQ ID NO: 40394 - protein, 7 aa, synthetic construct
YYTGHPN

SEQ ID NO: 40395 - protein, 7 aa, synthetic construct
RENEVRW

SEQ ID NO: 40396 - protein, 7 aa, synthetic construct
YWTGQVE

SEQ ID NO: 40397 - protein, 7 aa, synthetic construct
MSEFKSW

SEQ ID NO: 40398 - protein, 7 aa, synthetic construct
PPVIQCS

SEQ ID NO: 40399 - protein, 7 aa, synthetic construct
MPDGTGP

SEQ ID NO: 40400 - protein, 7 aa, synthetic construct
CGLNPCG

SEQ ID NO: 40401 - protein, 7 aa, synthetic construct
CKPMAPD

SEQ ID NO: 40402 - protein, 7 aa, synthetic construct
CTSKTEH

SEQ ID NO: 40403 - protein, 7 aa, synthetic construct
SAPTCKG

SEQ ID NO: 40404 - protein, 7 aa, synthetic construct
YDPGCKE

SEQ ID NO: 40405 - protein, 7 aa, synthetic construct
CKPPFVA

SEQ ID NO: 40406 - protein, 7 aa, synthetic construct
GSEFKSW

SEQ ID NO: 40407 - protein, 7 aa, synthetic construct
CKPGMGS

SEQ ID NO: 40408 - protein, 7 aa, synthetic construct
YFSGTVT

SEQ ID NO: 40409 - protein, 7 aa, synthetic construct
KEEHVRW

SEQ ID NO: 40410 - protein, 7 aa, synthetic construct
CKPPPTP

SEQ ID NO: 40411 - protein, 7 aa, synthetic construct
YYSGQRE

SEQ ID NO: 40412 - protein, 7 aa, synthetic construct
GDNNKVC

SEQ ID NO: 40413 - protein, 7 aa, synthetic construct
VNDAGKC

SEQ ID NO: 40414 - protein, 7 aa, synthetic construct
FWTGKVE

SEQ ID NO: 40415 - protein, 7 aa, synthetic construct
YYSGVQA

SEQ ID NO: 40416 - protein, 7 aa, synthetic construct
KNDYATW

SEQ ID NO: 40417 - protein, 7 aa, synthetic construct
CKPVKGE

SEQ ID NO: 40418 - protein, 7 aa, synthetic construct
CTSKTYH

SEQ ID NO: 40419 - protein, 7 aa, synthetic construct
LAKTAWN

SEQ ID NO: 40420 - protein, 7 aa, synthetic construct
YYSGVSA

SEQ ID NO: 40421 - protein, 7 aa, synthetic construct
IPGCMSF

SEQ ID NO: 40422 - protein, 7 aa, synthetic construct
CNKPLTA

SEQ ID NO: 40423 - protein, 7 aa, synthetic construct
KDGLSRW

SEQ ID NO: 40424 - protein, 7 aa, synthetic construct
CKPGSPL

SEQ ID NO: 40425 - protein, 7 aa, synthetic construct
LEKPCLT

SEQ ID NO: 40426 - protein, 7 aa, synthetic construct
CKPGQPM

SEQ ID NO: 40427 - protein, 7 aa, synthetic construct
FWSGVPA

SEQ ID NO: 40428 - protein, 7 aa, synthetic construct
GGSTSSW

SEQ ID NO: 40429 - protein, 7 aa, synthetic construct
YFTGVQT

SEQ ID NO: 40430 - protein, 7 aa, synthetic construct
YYSGKHE

SEQ ID NO: 40431 - protein, 7 aa, synthetic construct
RLYDAIA

SEQ ID NO: 40432 - protein, 7 aa, synthetic construct
YFTGTAK

SEQ ID NO: 40433 - protein, 7 aa, synthetic construct
WWSSIKE

SEQ ID NO: 40434 - protein, 7 aa, synthetic construct
LAKTGCM

SEQ ID NO: 40435 - protein, 7 aa, synthetic construct
YWQGKVA

SEQ ID NO: 40436 - protein, 7 aa, synthetic construct
DTNHKWS

SEQ ID NO: 40437 - protein, 7 aa, synthetic construct
SDGQSKW

SEQ ID NO: 40438 - protein, 7 aa, synthetic construct
YSRISSN

SEQ ID NO: 40439 - protein, 7 aa, synthetic construct
VSTHCFA

SEQ ID NO: 40440 - protein, 7 aa, synthetic construct
YYTGQVL

SEQ ID NO: 40441 - protein, 7 aa, synthetic construct
YYHGIAA

SEQ ID NO: 40442 - protein, 7 aa, synthetic construct
YFSGMQA

SEQ ID NO: 40443 - protein, 7 aa, synthetic construct
KQGEGSC

SEQ ID NO: 40444 - protein, 7 aa, synthetic construct
FWSGKLD

SEQ ID NO: 40445 - protein, 7 aa, synthetic construct
CAPALHE

SEQ ID NO: 40446 - protein, 7 aa, synthetic construct
RDEYVMY

SEQ ID NO: 40447 - protein, 7 aa, synthetic construct
YWQGTVA

SEQ ID NO: 40448 - protein, 7 aa, synthetic construct
CAPAYRE

SEQ ID NO: 40449 - protein, 7 aa, synthetic construct
CGKKQLD

SEQ ID NO: 40450 - protein, 7 aa, synthetic construct
YYSGYKD

SEQ ID NO: 40451 - protein, 7 aa, synthetic construct
FWSGMKD

SEQ ID NO: 40452 - protein, 7 aa, synthetic construct
YFSGLRD

SEQ ID NO: 40453 - protein, 7 aa, synthetic construct
NYARSAE

SEQ ID NO: 40454 - protein, 7 aa, synthetic construct
GAGTSKW

SEQ ID NO: 40455 - protein, 7 aa, synthetic construct
GSGTSRW

SEQ ID NO: 40456 - protein, 7 aa, synthetic construct
CNEPMTA

SEQ ID NO: 40457 - protein, 7 aa, synthetic construct
MDGSSKW

SEQ ID NO: 40458 - protein, 7 aa, synthetic construct
YFTGEIL

SEQ ID NO: 40459 - protein, 7 aa, synthetic construct
YWKPEVN

SEQ ID NO: 40460 - protein, 7 aa, synthetic construct
RVIDAFP

SEQ ID NO: 40461 - protein, 7 aa, synthetic construct
YFSGMPD

SEQ ID NO: 40462 - protein, 7 aa, synthetic construct
PVESRTW

SEQ ID NO: 40463 - protein, 7 aa, synthetic construct
YSRVSVN

SEQ ID NO: 40464 - protein, 7 aa, synthetic construct
TYTGDPA

SEQ ID NO: 40465 - protein, 7 aa, synthetic construct
YYTGVTK

SEQ ID NO: 40466 - protein, 7 aa, synthetic construct
CKGVPCC

SEQ ID NO: 40467 - protein, 7 aa, synthetic construct
CDRSCKA

SEQ ID NO: 40468 - protein, 7 aa, synthetic construct
DMRDHRW

SEQ ID NO: 40469 - protein, 7 aa, synthetic construct
YWAGKME

SEQ ID NO: 40470 - protein, 7 aa, synthetic construct
REPTVRW

SEQ ID NO: 40471 - protein, 7 aa, synthetic construct
DMRSTKW

SEQ ID NO: 40472 - protein, 7 aa, synthetic construct
YHAKSTN

SEQ ID NO: 40473 - protein, 7 aa, synthetic construct
PLRLDPR

SEQ ID NO: 40474 - protein, 7 aa, synthetic construct
CRPDYRE

SEQ ID NO: 40475 - protein, 7 aa, synthetic construct
IMGDRIW

SEQ ID NO: 40476 - protein, 7 aa, synthetic construct
FWSGTVA

SEQ ID NO: 40477 - protein, 7 aa, synthetic construct
FWSGKVD

SEQ ID NO: 40478 - protein, 7 aa, synthetic construct
TKNSTTC

SEQ ID NO: 40479 - protein, 7 aa, synthetic construct
CKPGMGA

SEQ ID NO: 40480 - protein, 7 aa, synthetic construct
CTSKTGS

SEQ ID NO: 40481 - protein, 7 aa, synthetic construct
CKPSPMP

SEQ ID NO: 40482 - protein, 7 aa, synthetic construct
KATQQEC

SEQ ID NO: 40483 - protein, 7 aa, synthetic construct
YWTGTAS

SEQ ID NO: 40484 - protein, 7 aa, synthetic construct
YWSGTVK

SEQ ID NO: 40485 - protein, 7 aa, synthetic construct
CRDKMPG

SEQ ID NO: 40486 - protein, 7 aa, synthetic construct
FFTGVVS

SEQ ID NO: 40487 - protein, 7 aa, synthetic construct
LLASQTW

SEQ ID NO: 40488 - protein, 7 aa, synthetic construct
YWSGQID

SEQ ID NO: 40489 - protein, 7 aa, synthetic construct
LSRASFD

SEQ ID NO: 40490 - protein, 7 aa, synthetic construct
ALSDRSW

SEQ ID NO: 40491 - protein, 7 aa, synthetic construct
CVDKRHP

SEQ ID NO: 40492 - protein, 7 aa, synthetic construct
RDAVSRW

SEQ ID NO: 40493 - protein, 7 aa, synthetic construct
SMPDRSW

SEQ ID NO: 40494 - protein, 7 aa, synthetic construct
CATKCKP

SEQ ID NO: 40495 - protein, 7 aa, synthetic construct
GNKHCMD

SEQ ID NO: 40496 - protein, 7 aa, synthetic construct
WPNGVDG

SEQ ID NO: 40497 - protein, 7 aa, synthetic construct
CKPVHPE

SEQ ID NO: 40498 - protein, 7 aa, synthetic construct
LRNGTPA

SEQ ID NO: 40499 - protein, 7 aa, synthetic construct
YFTAKIE

SEQ ID NO: 40500 - protein, 7 aa, synthetic construct
GPPRCPA

SEQ ID NO: 40501 - protein, 7 aa, synthetic construct
RLPTTPC

SEQ ID NO: 40502 - protein, 7 aa, synthetic construct
CMSDSKA

SEQ ID NO: 40503 - protein, 7 aa, synthetic construct
YHRQNPM

SEQ ID NO: 40504 - protein, 7 aa, synthetic construct
CKPMTHE

SEQ ID NO: 40505 - protein, 7 aa, synthetic construct
CAPYLQE

SEQ ID NO: 40506 - protein, 7 aa, synthetic construct
CTSKTGY

SEQ ID NO: 40507 - protein, 7 aa, synthetic construct
CMPKKEA

SEQ ID NO: 40508 - protein, 7 aa, synthetic construct
CSSKTGH

SEQ ID NO: 40509 - protein, 7 aa, synthetic construct
YFEGQRE

SEQ ID NO: 40510 - protein, 7 aa, synthetic construct
CREGRSS

SEQ ID NO: 40511 - protein, 7 aa, synthetic construct
YFAGVTA

SEQ ID NO: 40512 - protein, 7 aa, synthetic construct
CTSKAGH

SEQ ID NO: 40513 - protein, 7 aa, synthetic construct
CPKPMTA

SEQ ID NO: 40514 - protein, 7 aa, synthetic construct
MTGTSCV

SEQ ID NO: 40515 - protein, 7 aa, synthetic construct
VAKCGAG

SEQ ID NO: 40516 - protein, 7 aa, synthetic construct
RDERSCG

SEQ ID NO: 40517 - protein, 7 aa, synthetic construct
LARSCPD

SEQ ID NO: 40518 - protein, 7 aa, synthetic construct
EDKCRQF

SEQ ID NO: 40519 - protein, 7 aa, synthetic construct
CAPFYRE

SEQ ID NO: 40520 - protein, 7 aa, synthetic construct
RSEFATF

SEQ ID NO: 40521 - protein, 7 aa, synthetic construct
DPGDRKW

SEQ ID NO: 40522 - protein, 7 aa, synthetic construct
NDGSCKA

SEQ ID NO: 40523 - protein, 7 aa, synthetic construct
RTYETYP

SEQ ID NO: 40524 - protein, 7 aa, synthetic construct
RDGNSIW

SEQ ID NO: 40525 - protein, 7 aa, synthetic construct
KSDHVRW

SEQ ID NO: 40526 - protein, 7 aa, synthetic construct
CNKPMTN

SEQ ID NO: 40527 - protein, 7 aa, synthetic construct
YSRIGPI

SEQ ID NO: 40528 - protein, 7 aa, synthetic construct
RSEFTGF

SEQ ID NO: 40529 - protein, 7 aa, synthetic construct
CTSKTQH

SEQ ID NO: 40530 - protein, 7 aa, synthetic construct
YWSGRTE

SEQ ID NO: 40531 - protein, 7 aa, synthetic construct
CKIASVP

SEQ ID NO: 40532 - protein, 7 aa, synthetic construct
YLKSQFY

SEQ ID NO: 40533 - protein, 7 aa, synthetic construct
CKPGNAA

SEQ ID NO: 40534 - protein, 7 aa, synthetic construct
IKSGEGC

SEQ ID NO: 40535 - protein, 7 aa, synthetic construct
YEPGCKS

SEQ ID NO: 40536 - protein, 7 aa, synthetic construct
CNKPMMA

SEQ ID NO: 40537 - protein, 7 aa, synthetic construct
YTKLDPH

SEQ ID NO: 40538 - protein, 7 aa, synthetic construct
YYSGRLE

SEQ ID NO: 40539 - protein, 7 aa, synthetic construct
GCGTKDG

SEQ ID NO: 40540 - protein, 7 aa, synthetic construct
GKTGPDC

SEQ ID NO: 40541 - protein, 7 aa, synthetic construct
KDGVSSW

SEQ ID NO: 40542 - protein, 7 aa, synthetic construct
YFSRQID

SEQ ID NO: 40543 - protein, 7 aa, synthetic construct
KSDECKP

SEQ ID NO: 40544 - protein, 7 aa, synthetic construct
MTKTSCL

SEQ ID NO: 40545 - protein, 7 aa, synthetic construct
CKADSRI

SEQ ID NO: 40546 - protein, 7 aa, synthetic construct
CWKPMTA

SEQ ID NO: 40547 - protein, 7 aa, synthetic construct
AMGDRGW

SEQ ID NO: 40548 - protein, 7 aa, synthetic construct
YVKTDMY

SEQ ID NO: 40549 - protein, 7 aa, synthetic construct
YKATEPC

SEQ ID NO: 40550 - protein, 7 aa, synthetic construct
GGEFRHW

SEQ ID NO: 40551 - protein, 7 aa, synthetic construct
IKGSCEQ

SEQ ID NO: 40552 - protein, 7 aa, synthetic construct
REGNSLW

SEQ ID NO: 40553 - protein, 7 aa, synthetic construct
CKVKSGE

SEQ ID NO: 40554 - protein, 7 aa, synthetic construct
WQSTNGM

SEQ ID NO: 40555 - protein, 7 aa, synthetic construct
FGEFKCE

SEQ ID NO: 40556 - protein, 7 aa, synthetic construct
MDGVCKG

SEQ ID NO: 40557 - protein, 7 aa, synthetic construct
CKAVSHD

SEQ ID NO: 40558 - protein, 7 aa, synthetic construct
CDSKTGH

SEQ ID NO: 40559 - protein, 7 aa, synthetic construct
GSPGSAW

SEQ ID NO: 40560 - protein, 7 aa, synthetic construct
CKFPTKE

SEQ ID NO: 40561 - protein, 7 aa, synthetic construct
YQKEQQC

SEQ ID NO: 40562 - protein, 7 aa, synthetic construct
GCRKGDI

SEQ ID NO: 40563 - protein, 7 aa, synthetic construct
YFHGQLA

SEQ ID NO: 40564 - protein, 7 aa, synthetic construct
LSRPCSE

SEQ ID NO: 40565 - protein, 7 aa, synthetic construct
VLQSSSW

SEQ ID NO: 40566 - protein, 7 aa, synthetic construct
CSKETMS

SEQ ID NO: 40567 - protein, 7 aa, synthetic construct
YFTAIIE

SEQ ID NO: 40568 - protein, 7 aa, synthetic construct
CLGKCQG

SEQ ID NO: 40569 - protein, 7 aa, synthetic construct
LSRAGRD

SEQ ID NO: 40570 - protein, 7 aa, synthetic construct
FPPLFAA

SEQ ID NO: 40571 - protein, 7 aa, synthetic construct
YVRSDCA

SEQ ID NO: 40572 - protein, 7 aa, synthetic construct
WTEGTKY

SEQ ID NO: 40573 - protein, 7 aa, synthetic construct
YFAGKQE

SEQ ID NO: 40574 - protein, 7 aa, synthetic construct
RLYDSYA

SEQ ID NO: 40575 - protein, 7 aa, synthetic construct
YFSGERA

SEQ ID NO: 40576 - protein, 7 aa, synthetic construct
CNKPMEA

SEQ ID NO: 40577 - protein, 7 aa, synthetic construct
KTKSECD

SEQ ID NO: 40578 - protein, 7 aa, synthetic construct
CKPGATS

SEQ ID NO: 40579 - protein, 7 aa, synthetic construct
FDGYSAY

SEQ ID NO: 40580 - protein, 7 aa, synthetic construct
YWQGMLD

SEQ ID NO: 40581 - protein, 7 aa, synthetic construct
YWEGVRE

SEQ ID NO: 40582 - protein, 7 aa, synthetic construct
YFTGHPE

SEQ ID NO: 40583 - protein, 7 aa, synthetic construct
GGAGVRW

SEQ ID NO: 40584 - protein, 7 aa, synthetic construct
GCKPDFG

SEQ ID NO: 40585 - protein, 7 aa, synthetic construct
RSYDTYP

SEQ ID NO: 40586 - protein, 7 aa, synthetic construct
RPETCPR

SEQ ID NO: 40587 - protein, 7 aa, synthetic construct
CKPKCTP

SEQ ID NO: 40588 - protein, 7 aa, synthetic construct
YWTGMPE

SEQ ID NO: 40589 - protein, 7 aa, synthetic construct
MTGTSCF

SEQ ID NO: 40590 - protein, 7 aa, synthetic construct
CKDTKTV

SEQ ID NO: 40591 - protein, 7 aa, synthetic construct
YSRNSPN

SEQ ID NO: 40592 - protein, 7 aa, synthetic construct
VRGEDRC

SEQ ID NO: 40593 - protein, 7 aa, synthetic construct
YVRHDVH

SEQ ID NO: 40594 - protein, 7 aa, synthetic construct
CKPSKLP

SEQ ID NO: 40595 - protein, 7 aa, synthetic construct
YHRIGVN

SEQ ID NO: 40596 - protein, 7 aa, synthetic construct
YFEGRIA

SEQ ID NO: 40597 - protein, 7 aa, synthetic construct
WYSGVKA

SEQ ID NO: 40598 - protein, 7 aa, synthetic construct
CRSETKL

SEQ ID NO: 40599 - protein, 7 aa, synthetic construct
RMEDHGW

SEQ ID NO: 40600 - protein, 7 aa, synthetic construct
LNRPCSE

SEQ ID NO: 40601 - protein, 7 aa, synthetic construct
YFSGTYQ

SEQ ID NO: 40602 - protein, 7 aa, synthetic construct
WMPMCKA

SEQ ID NO: 40603 - protein, 7 aa, synthetic construct
MHRLSER

SEQ ID NO: 40604 - protein, 7 aa, synthetic construct
RPETCPI

SEQ ID NO: 40605 - protein, 7 aa, synthetic construct
YFAGVIE

SEQ ID NO: 40606 - protein, 7 aa, synthetic construct
CTRLSAP

SEQ ID NO: 40607 - protein, 7 aa, synthetic construct
TDDYSKW

SEQ ID NO: 40608 - protein, 7 aa, synthetic construct
PFAKSPM

SEQ ID NO: 40609 - protein, 7 aa, synthetic construct
ILQDRGW

SEQ ID NO: 40610 - protein, 7 aa, synthetic construct
YWTGRAD

SEQ ID NO: 40611 - protein, 7 aa, synthetic construct
FFTGMRD

SEQ ID NO: 40612 - protein, 7 aa, synthetic construct
RLGQTCA

SEQ ID NO: 40613 - protein, 7 aa, synthetic construct
VPERVCG

SEQ ID NO: 40614 - protein, 7 aa, synthetic construct
FWSGTKE

SEQ ID NO: 40615 - protein, 7 aa, synthetic construct
CKLSSTP

SEQ ID NO: 40616 - protein, 7 aa, synthetic construct
CKPDKVG

SEQ ID NO: 40617 - protein, 7 aa, synthetic construct
RTPTCPG

SEQ ID NO: 40618 - protein, 7 aa, synthetic construct
KFDNTCS

SEQ ID NO: 40619 - protein, 7 aa, synthetic construct
FHRSTPN

SEQ ID NO: 40620 - protein, 7 aa, synthetic construct
YWSGKQS

SEQ ID NO: 40621 - protein, 7 aa, synthetic construct
CKVSASA

SEQ ID NO: 40622 - protein, 7 aa, synthetic construct
GGDGSTW

SEQ ID NO: 40623 - protein, 7 aa, synthetic construct
RMLDVFP

SEQ ID NO: 40624 - protein, 7 aa, synthetic construct
PWRDCTK

SEQ ID NO: 40625 - protein, 7 aa, synthetic construct
WFSGKLD

SEQ ID NO: 40626 - protein, 7 aa, synthetic construct
IKAMIKQ

SEQ ID NO: 40627 - protein, 7 aa, synthetic construct
REEEVFP

SEQ ID NO: 40628 - protein, 7 aa, synthetic construct
LARMGVN

SEQ ID NO: 40629 - protein, 7 aa, synthetic construct
REPGVAW

SEQ ID NO: 40630 - protein, 7 aa, synthetic construct
YSRVGSH

SEQ ID NO: 40631 - protein, 7 aa, synthetic construct
CREGTTA

SEQ ID NO: 40632 - protein, 7 aa, synthetic construct
YFTGVQP

SEQ ID NO: 40633 - protein, 7 aa, synthetic construct
LHRDSPN

SEQ ID NO: 40634 - protein, 7 aa, synthetic construct
FWSGKID

SEQ ID NO: 40635 - protein, 7 aa, synthetic construct
MDGQSLW

SEQ ID NO: 40636 - protein, 7 aa, synthetic construct
YYSGVKY

SEQ ID NO: 40637 - protein, 7 aa, synthetic construct
SGDSNKC

SEQ ID NO: 40638 - protein, 7 aa, synthetic construct
LHKKMPD

SEQ ID NO: 40639 - protein, 7 aa, synthetic construct
KDDWNSF

SEQ ID NO: 40640 - protein, 7 aa, synthetic construct
PLRDCVK

SEQ ID NO: 40641 - protein, 7 aa, synthetic construct
FGGRCPE

SEQ ID NO: 40642 - protein, 7 aa, synthetic construct
GSGTSNW

SEQ ID NO: 40643 - protein, 7 aa, synthetic construct
YWSGTND

SEQ ID NO: 40644 - protein, 7 aa, synthetic construct
YSRDCEN

SEQ ID NO: 40645 - protein, 7 aa, synthetic construct
CKPLCKP

SEQ ID NO: 40646 - protein, 7 aa, synthetic construct
TQRPGEC

SEQ ID NO: 40647 - protein, 7 aa, synthetic construct
RDAFTSF

SEQ ID NO: 40648 - protein, 7 aa, synthetic construct
CNKRSGE

SEQ ID NO: 40649 - protein, 7 aa, synthetic construct
CKTQRPD

SEQ ID NO: 40650 - protein, 7 aa, synthetic construct
GGSGSSW

SEQ ID NO: 40651 - protein, 7 aa, synthetic construct
CTSNTGH

SEQ ID NO: 40652 - protein, 7 aa, synthetic construct
ADGSCKA

SEQ ID NO: 40653 - protein, 7 aa, synthetic construct
CTSKTGI

SEQ ID NO: 40654 - protein, 7 aa, synthetic construct
YWSGHQA

SEQ ID NO: 40655 - protein, 7 aa, synthetic construct
YTKAQMN

SEQ ID NO: 40656 - protein, 7 aa, synthetic construct
IKNNADC

SEQ ID NO: 40657 - protein, 7 aa, synthetic construct
GDECVKA

SEQ ID NO: 40658 - protein, 7 aa, synthetic construct
CNKPDTA

SEQ ID NO: 40659 - protein, 7 aa, synthetic construct
CMPQAGR

SEQ ID NO: 40660 - protein, 7 aa, synthetic construct
YVRSDLA

SEQ ID NO: 40661 - protein, 7 aa, synthetic construct
YTRLSYD

SEQ ID NO: 40662 - protein, 7 aa, synthetic construct
CAPLYRE

SEQ ID NO: 40663 - protein, 7 aa, synthetic construct
RSEFQVF

SEQ ID NO: 40664 - protein, 7 aa, synthetic construct
CAPYIHE

SEQ ID NO: 40665 - protein, 7 aa, synthetic construct
CAPYKHE

SEQ ID NO: 40666 - protein, 7 aa, synthetic construct
CTAKTGH

SEQ ID NO: 40667 - protein, 7 aa, synthetic construct
IESSRSW

SEQ ID NO: 40668 - protein, 7 aa, synthetic construct
CKPRTME

SEQ ID NO: 40669 - protein, 7 aa, synthetic construct
CKEGSSW

SEQ ID NO: 40670 - protein, 7 aa, synthetic construct
RGDGNYW

SEQ ID NO: 40671 - protein, 7 aa, synthetic construct
ICSKLQP

SEQ ID NO: 40672 - protein, 7 aa, synthetic construct
RGGNVYP

SEQ ID NO: 40673 - protein, 7 aa, synthetic construct
CKPPSRE

SEQ ID NO: 40674 - protein, 7 aa, synthetic construct
YEPGCKN

SEQ ID NO: 40675 - protein, 7 aa, synthetic construct
YFSNVRE

SEQ ID NO: 40676 - protein, 7 aa, synthetic construct
CKPGWGE

SEQ ID NO: 40677 - protein, 7 aa, synthetic construct
YHKLNPG

SEQ ID NO: 40678 - protein, 7 aa, synthetic construct
REGTPHC

SEQ ID NO: 40679 - protein, 7 aa, synthetic construct
CKPERMG

SEQ ID NO: 40680 - protein, 7 aa, synthetic construct
CMKPMTA

SEQ ID NO: 40681 - protein, 7 aa, synthetic construct
RGEFSYP

SEQ ID NO: 40682 - protein, 7 aa, synthetic construct
YSKYHVN

SEQ ID NO: 40683 - protein, 7 aa, synthetic construct
IAAHGCG

SEQ ID NO: 40684 - protein, 7 aa, synthetic construct
FFSGRLD

SEQ ID NO: 40685 - protein, 7 aa, synthetic construct
VGGACPY

SEQ ID NO: 40686 - protein, 7 aa, synthetic construct
YWAGRVE

SEQ ID NO: 40687 - protein, 7 aa, synthetic construct
QMGSSTW

SEQ ID NO: 40688 - protein, 7 aa, synthetic construct
YDKRENC

SEQ ID NO: 40689 - protein, 7 aa, synthetic construct
YFKEKCS

SEQ ID NO: 40690 - protein, 7 aa, synthetic construct
CQLKSTD

SEQ ID NO: 40691 - protein, 7 aa, synthetic construct
YYTGKTS

SEQ ID NO: 40692 - protein, 7 aa, synthetic construct
REEVSSW

SEQ ID NO: 40693 - protein, 7 aa, synthetic construct
MEGTSCL

SEQ ID NO: 40694 - protein, 7 aa, synthetic construct
CKPPPFA

SEQ ID NO: 40695 - protein, 7 aa, synthetic construct
KSDYATY

SEQ ID NO: 40696 - protein, 7 aa, synthetic construct
LAKAGCN

SEQ ID NO: 40697 - protein, 7 aa, synthetic construct
LMQDRSW

SEQ ID NO: 40698 - protein, 7 aa, synthetic construct
YYAGKCA

SEQ ID NO: 40699 - protein, 7 aa, synthetic construct
CRPYLHE

SEQ ID NO: 40700 - protein, 7 aa, synthetic construct
GQGTSKW

SEQ ID NO: 40701 - protein, 7 aa, synthetic construct
CLKRCTP

SEQ ID NO: 40702 - protein, 7 aa, synthetic construct
QNQTSRW

SEQ ID NO: 40703 - protein, 7 aa, synthetic construct
YWSAVVD

SEQ ID NO: 40704 - protein, 7 aa, synthetic construct
CTSKTIH

SEQ ID NO: 40705 - protein, 7 aa, synthetic construct
AGPDRGW

SEQ ID NO: 40706 - protein, 7 aa, synthetic construct
FFSGQIA

SEQ ID NO: 40707 - protein, 7 aa, synthetic construct
YTRLNDG

SEQ ID NO: 40708 - protein, 7 aa, synthetic construct
LAKPCLT

SEQ ID NO: 40709 - protein, 7 aa, synthetic construct
FFSGKIS

SEQ ID NO: 40710 - protein, 7 aa, synthetic construct
LSRLAFD

SEQ ID NO: 40711 - protein, 7 aa, synthetic construct
KGDIKCA

SEQ ID NO: 40712 - protein, 7 aa, synthetic construct
CLAGKDA

SEQ ID NO: 40713 - protein, 7 aa, synthetic construct
FFTGERA

SEQ ID NO: 40714 - protein, 7 aa, synthetic construct
YYHGVRD

SEQ ID NO: 40715 - protein, 7 aa, synthetic construct
YHGKESC

SEQ ID NO: 40716 - protein, 7 aa, synthetic construct
CGAIKPP

SEQ ID NO: 40717 - protein, 7 aa, synthetic construct
KTEFTTY

SEQ ID NO: 40718 - protein, 7 aa, synthetic construct
YWEGVKD

SEQ ID NO: 40719 - protein, 7 aa, synthetic construct
FEPGCKE

SEQ ID NO: 40720 - protein, 7 aa, synthetic construct
CGESVKP

SEQ ID NO: 40721 - protein, 7 aa, synthetic construct
TNGTKCE

SEQ ID NO: 40722 - protein, 7 aa, synthetic construct
YEPICKE

SEQ ID NO: 40723 - protein, 7 aa, synthetic construct
WVKGAEC

SEQ ID NO: 40724 - protein, 7 aa, synthetic construct
CKPFVVE

SEQ ID NO: 40725 - protein, 7 aa, synthetic construct
GCGTKEG

SEQ ID NO: 40726 - protein, 7 aa, synthetic construct
TPDTVRW

SEQ ID NO: 40727 - protein, 7 aa, synthetic construct
YFSGQQR

SEQ ID NO: 40728 - protein, 7 aa, synthetic construct
YFSGYPD

SEQ ID NO: 40729 - protein, 7 aa, synthetic construct
CVPDYRE

SEQ ID NO: 40730 - protein, 7 aa, synthetic construct
CKPGQLP

SEQ ID NO: 40731 - protein, 7 aa, synthetic construct
CLKQLPP

SEQ ID NO: 40732 - protein, 7 aa, synthetic construct
GVGTKCG

SEQ ID NO: 40733 - protein, 7 aa, synthetic construct
YVRHDVR

SEQ ID NO: 40734 - protein, 7 aa, synthetic construct
CSRLPTP

SEQ ID NO: 40735 - protein, 7 aa, synthetic construct
RTYDTFA

SEQ ID NO: 40736 - protein, 7 aa, synthetic construct
IAHKCPG

SEQ ID NO: 40737 - protein, 7 aa, synthetic construct
FFTGKMD

SEQ ID NO: 40738 - protein, 7 aa, synthetic construct
QCKPCLT

SEQ ID NO: 40739 - protein, 7 aa, synthetic construct
YFSGRPS

SEQ ID NO: 40740 - protein, 7 aa, synthetic construct
RHEDVYP

SEQ ID NO: 40741 - protein, 7 aa, synthetic construct
LCRPESE

SEQ ID NO: 40742 - protein, 7 aa, synthetic construct
CKNNNSE

SEQ ID NO: 40743 - protein, 7 aa, synthetic construct
WWTGMVA

SEQ ID NO: 40744 - protein, 7 aa, synthetic construct
CDGSPKA

SEQ ID NO: 40745 - protein, 7 aa, synthetic construct
DLKSVKW

SEQ ID NO: 40746 - protein, 7 aa, synthetic construct
WTEMCKA

SEQ ID NO: 40747 - protein, 7 aa, synthetic construct
GPEGVRW

SEQ ID NO: 40748 - protein, 7 aa, synthetic construct
YTRLQFD

SEQ ID NO: 40749 - protein, 7 aa, synthetic construct
CKLDKMV

SEQ ID NO: 40750 - protein, 7 aa, synthetic construct
CNRPMTA

SEQ ID NO: 40751 - protein, 7 aa, synthetic construct
GPGTKCG

SEQ ID NO: 40752 - protein, 7 aa, synthetic construct
CARMNSN

SEQ ID NO: 40753 - protein, 7 aa, synthetic construct
CKPPKGD

SEQ ID NO: 40754 - protein, 7 aa, synthetic construct
RSDTVYF

SEQ ID NO: 40755 - protein, 7 aa, synthetic construct
LHKLNPC

SEQ ID NO: 40756 - protein, 7 aa, synthetic construct
CAPYLAE

SEQ ID NO: 40757 - protein, 7 aa, synthetic construct
CSPMRTP

SEQ ID NO: 40758 - protein, 7 aa, synthetic construct
CKPQMPT

SEQ ID NO: 40759 - protein, 7 aa, synthetic construct
FFTGTHE

SEQ ID NO: 40760 - protein, 7 aa, synthetic construct
TWDGDNA

SEQ ID NO: 40761 - protein, 7 aa, synthetic construct
MCEKAKD

SEQ ID NO: 40762 - protein, 7 aa, synthetic construct
YFQGVVA

SEQ ID NO: 40763 - protein, 7 aa, synthetic construct
KGDHVRW

SEQ ID NO: 40764 - protein, 7 aa, synthetic construct
REPTCPY

SEQ ID NO: 40765 - protein, 7 aa, synthetic construct
FFSGERE

SEQ ID NO: 40766 - protein, 7 aa, synthetic construct
CNKKMGD

SEQ ID NO: 40767 - protein, 7 aa, synthetic construct
YHKLDNM

SEQ ID NO: 40768 - protein, 7 aa, synthetic construct
VMEDRSW

SEQ ID NO: 40769 - protein, 7 aa, synthetic construct
GSEYSSY

SEQ ID NO: 40770 - protein, 7 aa, synthetic construct
CAPTLHE

SEQ ID NO: 40771 - protein, 7 aa, synthetic construct
IRDYKTC

SEQ ID NO: 40772 - protein, 7 aa, synthetic construct
YWSQVQA

SEQ ID NO: 40773 - protein, 7 aa, synthetic construct
QRGVGMC

SEQ ID NO: 40774 - protein, 7 aa, synthetic construct
YFAGKTS

SEQ ID NO: 40775 - protein, 7 aa, synthetic construct
CRSTNGV

SEQ ID NO: 40776 - protein, 7 aa, synthetic construct
SDGYSKW

SEQ ID NO: 40777 - protein, 7 aa, synthetic construct
FWSGMVA

SEQ ID NO: 40778 - protein, 7 aa, synthetic construct
GGGSSSW

SEQ ID NO: 40779 - protein, 7 aa, synthetic construct
FWSGIPE

SEQ ID NO: 40780 - protein, 7 aa, synthetic construct
LWDGTVA

SEQ ID NO: 40781 - protein, 7 aa, synthetic construct
YSRLDNL

SEQ ID NO: 40782 - protein, 7 aa, synthetic construct
YWSGQLE

SEQ ID NO: 40783 - protein, 7 aa, synthetic construct
CKSDRKE

SEQ ID NO: 40784 - protein, 7 aa, synthetic construct
TTEGVRW

SEQ ID NO: 40785 - protein, 7 aa, synthetic construct
DLSSTQW

SEQ ID NO: 40786 - protein, 7 aa, synthetic construct
CKPAMHE

SEQ ID NO: 40787 - protein, 7 aa, synthetic construct
CRPPMLE

SEQ ID NO: 40788 - protein, 7 aa, synthetic construct
CMSKTGH

SEQ ID NO: 40789 - protein, 7 aa, synthetic construct
YARLSPM

SEQ ID NO: 40790 - protein, 7 aa, synthetic construct
RTYDTYA

SEQ ID NO: 40791 - protein, 7 aa, synthetic construct
TDGSCKA

SEQ ID NO: 40792 - protein, 7 aa, synthetic construct
CAPDARE

SEQ ID NO: 40793 - protein, 7 aa, synthetic construct
CKPGAGE

SEQ ID NO: 40794 - protein, 7 aa, synthetic construct
RDAASSW

SEQ ID NO: 40795 - protein, 7 aa, synthetic construct
DMASMKW

SEQ ID NO: 40796 - protein, 7 aa, synthetic construct
RDNGCKE

SEQ ID NO: 40797 - protein, 7 aa, synthetic construct
YWSEIRE

SEQ ID NO: 40798 - protein, 7 aa, synthetic construct
NAAVGNC

SEQ ID NO: 40799 - protein, 7 aa, synthetic construct
GSPGVQW

SEQ ID NO: 40800 - protein, 7 aa, synthetic construct
NLESREW

SEQ ID NO: 40801 - protein, 7 aa, synthetic construct
MKGSCEQ

SEQ ID NO: 40802 - protein, 7 aa, synthetic construct
KDDFVVF

SEQ ID NO: 40803 - protein, 7 aa, synthetic construct
YWAGKYD

SEQ ID NO: 40804 - protein, 7 aa, synthetic construct
CRPSGLE

SEQ ID NO: 40805 - protein, 7 aa, synthetic construct
GAGTKCG

SEQ ID NO: 40806 - protein, 7 aa, synthetic construct
CKGPYSE

SEQ ID NO: 40807 - protein, 7 aa, synthetic construct
RDPGVRW

SEQ ID NO: 40808 - protein, 7 aa, synthetic construct
YNNKTTC

SEQ ID NO: 40809 - protein, 7 aa, synthetic construct
YYSGQRD

SEQ ID NO: 40810 - protein, 7 aa, synthetic construct
CKPGSPI

SEQ ID NO: 40811 - protein, 7 aa, synthetic construct
YFSGMPL

SEQ ID NO: 40812 - protein, 7 aa, synthetic construct
GGGVSRW

SEQ ID NO: 40813 - protein, 7 aa, synthetic construct
TEPGCKE

SEQ ID NO: 40814 - protein, 7 aa, synthetic construct
YFHGMTD

SEQ ID NO: 40815 - protein, 7 aa, synthetic construct
FFSGRLE

SEQ ID NO: 40816 - protein, 7 aa, synthetic construct
GGMGSQW

SEQ ID NO: 40817 - protein, 7 aa, synthetic construct
CKPQAGP

SEQ ID NO: 40818 - protein, 7 aa, synthetic construct
FFTGACD

SEQ ID NO: 40819 - protein, 7 aa, synthetic construct
GGSGTQC

SEQ ID NO: 40820 - protein, 7 aa, synthetic construct
WSAAVQC

SEQ ID NO: 40821 - protein, 7 aa, synthetic construct
CNKPMIA

SEQ ID NO: 40822 - protein, 7 aa, synthetic construct
CKPQAGT

SEQ ID NO: 40823 - protein, 7 aa, synthetic construct
KGDSRDW

SEQ ID NO: 40824 - protein, 7 aa, synthetic construct
VPERCPL

SEQ ID NO: 40825 - protein, 7 aa, synthetic construct
GCRHGDS

SEQ ID NO: 40826 - protein, 7 aa, synthetic construct
SMQDRMW

SEQ ID NO: 40827 - protein, 7 aa, synthetic construct
YFQGIQA

SEQ ID NO: 40828 - protein, 7 aa, synthetic construct
WWSAIRE

SEQ ID NO: 40829 - protein, 7 aa, synthetic construct
YSRLSEF

SEQ ID NO: 40830 - protein, 7 aa, synthetic construct
WTHMCKA

SEQ ID NO: 40831 - protein, 7 aa, synthetic construct
RAEAVRW

SEQ ID NO: 40832 - protein, 7 aa, synthetic construct
YWSGQVE

SEQ ID NO: 40833 - protein, 7 aa, synthetic construct
SMQDRHW

SEQ ID NO: 40834 - protein, 7 aa, synthetic construct
YVAQCQV

SEQ ID NO: 40835 - protein, 7 aa, synthetic construct
TWSGDNA

SEQ ID NO: 40836 - protein, 7 aa, synthetic construct
IAHEGAG

SEQ ID NO: 40837 - protein, 7 aa, synthetic construct
DLGDRKW

SEQ ID NO: 40838 - protein, 7 aa, synthetic construct
KFDFTGV

SEQ ID NO: 40839 - protein, 7 aa, synthetic construct
YEYGCKE

SEQ ID NO: 40840 - protein, 7 aa, synthetic construct
RDDGSYW

SEQ ID NO: 40841 - protein, 7 aa, synthetic construct
TWDGYDA

SEQ ID NO: 40842 - protein, 7 aa, synthetic construct
RDDFSPY

SEQ ID NO: 40843 - protein, 7 aa, synthetic construct
RNEFSGF

SEQ ID NO: 40844 - protein, 7 aa, synthetic construct
CKPQALT

SEQ ID NO: 40845 - protein, 7 aa, synthetic construct
YKSNTTC

SEQ ID NO: 40846 - protein, 7 aa, synthetic construct
RDEFLSY

SEQ ID NO: 40847 - protein, 7 aa, synthetic construct
CTSKVGH

SEQ ID NO: 40848 - protein, 7 aa, synthetic construct
CRPQAGA

SEQ ID NO: 40849 - protein, 7 aa, synthetic construct
CKMPGMD

SEQ ID NO: 40850 - protein, 7 aa, synthetic construct
YSRFHLN

SEQ ID NO: 40851 - protein, 7 aa, synthetic construct
FTKSCPV

SEQ ID NO: 40852 - protein, 7 aa, synthetic construct
QYARSMM

SEQ ID NO: 40853 - protein, 7 aa, synthetic construct
REGTSSW

SEQ ID NO: 40854 - protein, 7 aa, synthetic construct
GNATSHW

SEQ ID NO: 40855 - protein, 7 aa, synthetic construct
CKPPMFE

SEQ ID NO: 40856 - protein, 7 aa, synthetic construct
YWSAVTE

SEQ ID NO: 40857 - protein, 7 aa, synthetic construct
CAKQCKP

SEQ ID NO: 40858 - protein, 7 aa, synthetic construct
CNKPSTA

SEQ ID NO: 40859 - protein, 7 aa, synthetic construct
CKLPKME

SEQ ID NO: 40860 - protein, 7 aa, synthetic construct
YWHGKPD

SEQ ID NO: 40861 - protein, 7 aa, synthetic construct
AGHDRGW

SEQ ID NO: 40862 - protein, 7 aa, synthetic construct
RMEEVFP

SEQ ID NO: 40863 - protein, 7 aa, synthetic construct
MTGTSCP

SEQ ID NO: 40864 - protein, 7 aa, synthetic construct
NMQDRSW

SEQ ID NO: 40865 - protein, 7 aa, synthetic construct
FWSGKLE

SEQ ID NO: 40866 - protein, 7 aa, synthetic construct
DGSNKSC

SEQ ID NO: 40867 - protein, 7 aa, synthetic construct
CKPMQMP

SEQ ID NO: 40868 - protein, 7 aa, synthetic construct
GGEASRW

SEQ ID NO: 40869 - protein, 7 aa, synthetic construct
MEDYVSY

SEQ ID NO: 40870 - protein, 7 aa, synthetic construct
YEPGCKI

SEQ ID NO: 40871 - protein, 7 aa, synthetic construct
KDDFNIF

SEQ ID NO: 40872 - protein, 7 aa, synthetic construct
YFHGRPD

SEQ ID NO: 40873 - protein, 7 aa, synthetic construct
LPKMGCA

SEQ ID NO: 40874 - protein, 7 aa, synthetic construct
CKAPKYD

SEQ ID NO: 40875 - protein, 7 aa, synthetic construct
CKPPSRD

SEQ ID NO: 40876 - protein, 7 aa, synthetic construct
KFDGTEC

SEQ ID NO: 40877 - protein, 7 aa, synthetic construct
KSDYMVY

SEQ ID NO: 40878 - protein, 7 aa, synthetic construct
CKPERMS

SEQ ID NO: 40879 - protein, 7 aa, synthetic construct
PCPVKPD

SEQ ID NO: 40880 - protein, 7 aa, synthetic construct
YFTGAHE

SEQ ID NO: 40881 - protein, 7 aa, synthetic construct
RGGDRAW

SEQ ID NO: 40882 - protein, 7 aa, synthetic construct
GWGTKCG

SEQ ID NO: 40883 - protein, 7 aa, synthetic construct
MNNSTKC

SEQ ID NO: 40884 - protein, 7 aa, synthetic construct
GIEHVRW

SEQ ID NO: 40885 - protein, 7 aa, synthetic construct
SDGASKW

SEQ ID NO: 40886 - protein, 7 aa, synthetic construct
CQKPMTA

SEQ ID NO: 40887 - protein, 7 aa, synthetic construct
YFTGNID

SEQ ID NO: 40888 - protein, 7 aa, synthetic construct
YYTGRAE

SEQ ID NO: 40889 - protein, 7 aa, synthetic construct
CNTPMTA

SEQ ID NO: 40890 - protein, 7 aa, synthetic construct
KKDHSCD

SEQ ID NO: 40891 - protein, 7 aa, synthetic construct
MDDWVVY

SEQ ID NO: 40892 - protein, 7 aa, synthetic construct
CKSVCKP

SEQ ID NO: 40893 - protein, 7 aa, synthetic construct
KNDYNSW

SEQ ID NO: 40894 - protein, 7 aa, synthetic construct
RSDTVYW

SEQ ID NO: 40895 - protein, 7 aa, synthetic construct
ETPMCKA

SEQ ID NO: 40896 - protein, 7 aa, synthetic construct
FKGSCEQ

SEQ ID NO: 40897 - protein, 7 aa, synthetic construct
CMPDYRE

SEQ ID NO: 40898 - protein, 7 aa, synthetic construct
NCKPCLT

SEQ ID NO: 40899 - protein, 7 aa, synthetic construct
GSEFEKW

SEQ ID NO: 40900 - protein, 7 aa, synthetic construct
YGKSTEC

SEQ ID NO: 40901 - protein, 7 aa, synthetic construct
CKPTSIE

SEQ ID NO: 40902 - protein, 7 aa, synthetic construct
DLQSSNW

SEQ ID NO: 40903 - protein, 7 aa, synthetic construct
YWSGQHA

SEQ ID NO: 40904 - protein, 7 aa, synthetic construct
FFSGVVK

SEQ ID NO: 40905 - protein, 7 aa, synthetic construct
ICRPCSE

SEQ ID NO: 40906 - protein, 7 aa, synthetic construct
PDGSCKA

SEQ ID NO: 40907 - protein, 7 aa, synthetic construct
CAPDYRI

SEQ ID NO: 40908 - protein, 7 aa, synthetic construct
RMQDRSW

SEQ ID NO: 40909 - protein, 7 aa, synthetic construct
WFTGVKE

SEQ ID NO: 40910 - protein, 7 aa, synthetic construct
MMQDRSW

SEQ ID NO: 40911 - protein, 7 aa, synthetic construct
CKPVPPE

SEQ ID NO: 40912 - protein, 7 aa, synthetic construct
GGNGSTW

SEQ ID NO: 40913 - protein, 7 aa, synthetic construct
GCGTKNG

SEQ ID NO: 40914 - protein, 7 aa, synthetic construct
YWSGRVD

SEQ ID NO: 40915 - protein, 7 aa, synthetic construct
CKMPGRD

SEQ ID NO: 40916 - protein, 7 aa, synthetic construct
REETVGW

SEQ ID NO: 40917 - protein, 7 aa, synthetic construct
TRNGQEC

SEQ ID NO: 40918 - protein, 7 aa, synthetic construct
GHGTKCG

SEQ ID NO: 40919 - protein, 7 aa, synthetic construct
REDFQTW

SEQ ID NO: 40920 - protein, 7 aa, synthetic construct
IKDYKGC

SEQ ID NO: 40921 - protein, 7 aa, synthetic construct
CRPEGAC

SEQ ID NO: 40922 - protein, 7 aa, synthetic construct
FSKLNPD

SEQ ID NO: 40923 - protein, 7 aa, synthetic construct
ESEFKTY

SEQ ID NO: 40924 - protein, 7 aa, synthetic construct
GGESCKS

SEQ ID NO: 40925 - protein, 7 aa, synthetic construct
ELSSPKW

SEQ ID NO: 40926 - protein, 7 aa, synthetic construct
VSEYKTF

SEQ ID NO: 40927 - protein, 7 aa, synthetic construct
CKPMMGE

SEQ ID NO: 40928 - protein, 7 aa, synthetic construct
CTSITGH

SEQ ID NO: 40929 - protein, 7 aa, synthetic construct
YWSGRNE

SEQ ID NO: 40930 - protein, 7 aa, synthetic construct
YWTGQMD

SEQ ID NO: 40931 - protein, 7 aa, synthetic construct
YFTAIVE

SEQ ID NO: 40932 - protein, 7 aa, synthetic construct
ITGGKTC

SEQ ID NO: 40933 - protein, 7 aa, synthetic construct
YFQGKLE

SEQ ID NO: 40934 - protein, 7 aa, synthetic construct
CNKPHTA

SEQ ID NO: 40935 - protein, 7 aa, synthetic construct
YEGGCKE

SEQ ID NO: 40936 - protein, 7 aa, synthetic construct
VPQDRAW

SEQ ID NO: 40937 - protein, 7 aa, synthetic construct
YSRITPN

SEQ ID NO: 40938 - protein, 7 aa, synthetic construct
GQDSVKC

SEQ ID NO: 40939 - protein, 7 aa, synthetic construct
KPDWVEF

SEQ ID NO: 40940 - protein, 7 aa, synthetic construct
ALPPKCS

SEQ ID NO: 40941 - protein, 7 aa, synthetic construct
CTGKTGH

SEQ ID NO: 40942 - protein, 7 aa, synthetic construct
FFTGIVS

SEQ ID NO: 40943 - protein, 7 aa, synthetic construct
TPYDAIA

SEQ ID NO: 40944 - protein, 7 aa, synthetic construct
GCGTKQG

SEQ ID NO: 40945 - protein, 7 aa, synthetic construct
FFTGTVE

SEQ ID NO: 40946 - protein, 7 aa, synthetic construct
RNEFTAY

SEQ ID NO: 40947 - protein, 7 aa, synthetic construct
RDPCTVD

SEQ ID NO: 40948 - protein, 7 aa, synthetic construct
GSGTSTW

SEQ ID NO: 40949 - protein, 7 aa, synthetic construct
QPSPCKP

SEQ ID NO: 40950 - protein, 7 aa, synthetic construct
YSRLDVF

SEQ ID NO: 40951 - protein, 7 aa, synthetic construct
GAATSKW

SEQ ID NO: 40952 - protein, 7 aa, synthetic construct
YSRLDSF

SEQ ID NO: 40953 - protein, 7 aa, synthetic construct
REEAIRW

SEQ ID NO: 40954 - protein, 7 aa, synthetic construct
VMQDRSW

SEQ ID NO: 40955 - protein, 7 aa, synthetic construct
IARTGCD

SEQ ID NO: 40956 - protein, 7 aa, synthetic construct
VHKLCPV

SEQ ID NO: 40957 - protein, 7 aa, synthetic construct
WFTGRHD

SEQ ID NO: 40958 - protein, 7 aa, synthetic construct
CGKSGPS

SEQ ID NO: 40959 - protein, 7 aa, synthetic construct
EGGSCKP

SEQ ID NO: 40960 - protein, 7 aa, synthetic construct
DNRGMIA

SEQ ID NO: 40961 - protein, 7 aa, synthetic construct
LGIGCCK

SEQ ID NO: 40962 - protein, 7 aa, synthetic construct
WTPNCKA

SEQ ID NO: 40963 - protein, 7 aa, synthetic construct
CGPYLHE

SEQ ID NO: 40964 - protein, 7 aa, synthetic construct
WYSGVKE

SEQ ID NO: 40965 - protein, 7 aa, synthetic construct
CKNTKVD

SEQ ID NO: 40966 - protein, 7 aa, synthetic construct
WQSTNGI

SEQ ID NO: 40967 - protein, 7 aa, synthetic construct
KFDYQGT

SEQ ID NO: 40968 - protein, 7 aa, synthetic construct
GSGNQRW

SEQ ID NO: 40969 - protein, 7 aa, synthetic construct
WYSGVRE

SEQ ID NO: 40970 - protein, 7 aa, synthetic construct
MHRLQED

SEQ ID NO: 40971 - protein, 7 aa, synthetic construct
YFTARVE

SEQ ID NO: 40972 - protein, 7 aa, synthetic construct
FFAGVKE

SEQ ID NO: 40973 - protein, 7 aa, synthetic construct
CTSKQGH

SEQ ID NO: 40974 - protein, 7 aa, synthetic construct
YTRLDGN

SEQ ID NO: 40975 - protein, 7 aa, synthetic construct
FFTGMVD

SEQ ID NO: 40976 - protein, 7 aa, synthetic construct
LSRAGYD

SEQ ID NO: 40977 - protein, 7 aa, synthetic construct
NKEGCKP

SEQ ID NO: 40978 - protein, 7 aa, synthetic construct
YTRLQNL

SEQ ID NO: 40979 - protein, 7 aa, synthetic construct
CKTKLLE

SEQ ID NO: 40980 - protein, 7 aa, synthetic construct
VPCPVPP

SEQ ID NO: 40981 - protein, 7 aa, synthetic construct
YPPGCKE

SEQ ID NO: 40982 - protein, 7 aa, synthetic construct
TRWGDNA

SEQ ID NO: 40983 - protein, 7 aa, synthetic construct
CKMSCPM

SEQ ID NO: 40984 - protein, 7 aa, synthetic construct
GVESVRW

SEQ ID NO: 40985 - protein, 7 aa, synthetic construct
YWSGQLD

SEQ ID NO: 40986 - protein, 7 aa, synthetic construct
YTKSQVD

SEQ ID NO: 40987 - protein, 7 aa, synthetic construct
SDGNSKW

SEQ ID NO: 40988 - protein, 7 aa, synthetic construct
RDGESSW

SEQ ID NO: 40989 - protein, 7 aa, synthetic construct
CEARPIE

SEQ ID NO: 40990 - protein, 7 aa, synthetic construct
WFSKVIE

SEQ ID NO: 40991 - protein, 7 aa, synthetic construct
FYSGVKE

SEQ ID NO: 40992 - protein, 7 aa, synthetic construct
TDGYSRY

SEQ ID NO: 40993 - protein, 7 aa, synthetic construct
CGKIKCA

SEQ ID NO: 40994 - protein, 7 aa, synthetic construct
GSEFTSY

SEQ ID NO: 40995 - protein, 7 aa, synthetic construct
KNDHVRW

SEQ ID NO: 40996 - protein, 7 aa, synthetic construct
YDRLSCN

SEQ ID NO: 40997 - protein, 7 aa, synthetic construct
NKLKDCN

SEQ ID NO: 40998 - protein, 7 aa, synthetic construct
CSKPTPS

SEQ ID NO: 40999 - protein, 7 aa, synthetic construct
LMDGTSA

SEQ ID NO: 41000 - protein, 7 aa, synthetic construct
CKPLARD

SEQ ID NO: 41001 - protein, 7 aa, synthetic construct
IDEFLSW

SEQ ID NO: 41002 - protein, 7 aa, synthetic construct
MRSTNGV

SEQ ID NO: 41003 - protein, 7 aa, synthetic construct
WPPMCKA

SEQ ID NO: 41004 - protein, 7 aa, synthetic construct
CKIPGVP

SEQ ID NO: 41005 - protein, 7 aa, synthetic construct
CKPDKPL

SEQ ID NO: 41006 - protein, 7 aa, synthetic construct
RNDGVRW

SEQ ID NO: 41007 - protein, 7 aa, synthetic construct
CKPQTPT

SEQ ID NO: 41008 - protein, 7 aa, synthetic construct
DMSSMSW

SEQ ID NO: 41009 - protein, 7 aa, synthetic construct
GGGTSKW

SEQ ID NO: 41010 - protein, 7 aa, synthetic construct
YARGSNN

SEQ ID NO: 41011 - protein, 7 aa, synthetic construct
YFSNVKS

SEQ ID NO: 41012 - protein, 7 aa, synthetic construct
TKEGMCI

SEQ ID NO: 41013 - protein, 7 aa, synthetic construct
CSKKPCG

SEQ ID NO: 41014 - protein, 7 aa, synthetic construct
TRNESFC

SEQ ID NO: 41015 - protein, 7 aa, synthetic construct
WFSGQRD

SEQ ID NO: 41016 - protein, 7 aa, synthetic construct
CQRKCVP

SEQ ID NO: 41017 - protein, 7 aa, synthetic construct
CNNPMTA

SEQ ID NO: 41018 - protein, 7 aa, synthetic construct
YWSSVKD

SEQ ID NO: 41019 - protein, 7 aa, synthetic construct
VCRPCSE

SEQ ID NO: 41020 - protein, 7 aa, synthetic construct
GCRVGDI

SEQ ID NO: 41021 - protein, 7 aa, synthetic construct
FWTGMRE

SEQ ID NO: 41022 - protein, 7 aa, synthetic construct
YVKSQPV

SEQ ID NO: 41023 - protein, 7 aa, synthetic construct
FWSGTVE

SEQ ID NO: 41024 - protein, 7 aa, synthetic construct
CAPDKRE

SEQ ID NO: 41025 - protein, 7 aa, synthetic construct
YYSGVKV

SEQ ID NO: 41026 - protein, 7 aa, synthetic construct
CKANAPD

SEQ ID NO: 41027 - protein, 7 aa, synthetic construct
FARACQN

SEQ ID NO: 41028 - protein, 7 aa, synthetic construct
YYTGVMS

SEQ ID NO: 41029 - protein, 7 aa, synthetic construct
TFYGANA

SEQ ID NO: 41030 - protein, 7 aa, synthetic construct
GCGTKCQ

SEQ ID NO: 41031 - protein, 7 aa, synthetic construct
CNGTGPS

SEQ ID NO: 41032 - protein, 7 aa, synthetic construct
GGGTSAW

SEQ ID NO: 41033 - protein, 7 aa, synthetic construct
YFTARID

SEQ ID NO: 41034 - protein, 7 aa, synthetic construct
CRPGAIA

SEQ ID NO: 41035 - protein, 7 aa, synthetic construct
QKAGQEC

SEQ ID NO: 41036 - protein, 7 aa, synthetic construct
YKGGEPC

SEQ ID NO: 41037 - protein, 7 aa, synthetic construct
CKKFKED

SEQ ID NO: 41038 - protein, 7 aa, synthetic construct
GGHTSTW

SEQ ID NO: 41039 - protein, 7 aa, synthetic construct
LGDVMKC

SEQ ID NO: 41040 - protein, 7 aa, synthetic construct
GIGTKCG

SEQ ID NO: 41041 - protein, 7 aa, synthetic construct
KNDYITY

SEQ ID NO: 41042 - protein, 7 aa, synthetic construct
CKGDSKL

SEQ ID NO: 41043 - protein, 7 aa, synthetic construct
VSTHNCA

SEQ ID NO: 41044 - protein, 7 aa, synthetic construct
NKGEGGC

SEQ ID NO: 41045 - protein, 7 aa, synthetic construct
YFSGITT

SEQ ID NO: 41046 - protein, 7 aa, synthetic construct
WTPMCNA

SEQ ID NO: 41047 - protein, 7 aa, synthetic construct
SRPTCPA

SEQ ID NO: 41048 - protein, 7 aa, synthetic construct
PCGGKPI

SEQ ID NO: 41049 - protein, 7 aa, synthetic construct
FWGGVKE

SEQ ID NO: 41050 - protein, 7 aa, synthetic construct
WARGHDC

SEQ ID NO: 41051 - protein, 7 aa, synthetic construct
LHRLSDW

SEQ ID NO: 41052 - protein, 7 aa, synthetic construct
KDEYMYF

SEQ ID NO: 41053 - protein, 7 aa, synthetic construct
CKGDAKA

SEQ ID NO: 41054 - protein, 7 aa, synthetic construct
VAERGCG

SEQ ID NO: 41055 - protein, 7 aa, synthetic construct
CKPHKLD

SEQ ID NO: 41056 - protein, 7 aa, synthetic construct
YWAGVID

SEQ ID NO: 41057 - protein, 7 aa, synthetic construct
YSRIDNN

SEQ ID NO: 41058 - protein, 7 aa, synthetic construct
YWSHVKD

SEQ ID NO: 41059 - protein, 7 aa, synthetic construct
GAPTCCA

SEQ ID NO: 41060 - protein, 7 aa, synthetic construct
CNGPMTA

SEQ ID NO: 41061 - protein, 7 aa, synthetic construct
EGPIGQC

SEQ ID NO: 41062 - protein, 7 aa, synthetic construct
YYTGRAD

SEQ ID NO: 41063 - protein, 7 aa, synthetic construct
ISGGTAG

SEQ ID NO: 41064 - protein, 7 aa, synthetic construct
RSPDVFP

SEQ ID NO: 41065 - protein, 7 aa, synthetic construct
EMQDRSW

SEQ ID NO: 41066 - protein, 7 aa, synthetic construct
RGDEVFP

SEQ ID NO: 41067 - protein, 7 aa, synthetic construct
VGQRCAE

SEQ ID NO: 41068 - protein, 7 aa, synthetic construct
GSIGVSW

SEQ ID NO: 41069 - protein, 7 aa, synthetic construct
CRPDVKG

SEQ ID NO: 41070 - protein, 7 aa, synthetic construct
YFSQIVA

SEQ ID NO: 41071 - protein, 7 aa, synthetic construct
FFSGVQE

SEQ ID NO: 41072 - protein, 7 aa, synthetic construct
YYSGQRA

SEQ ID NO: 41073 - protein, 7 aa, synthetic construct
CKRGDAA

SEQ ID NO: 41074 - protein, 7 aa, synthetic construct
TWSGVVA

SEQ ID NO: 41075 - protein, 7 aa, synthetic construct
CAPYLLE

SEQ ID NO: 41076 - protein, 7 aa, synthetic construct
RGEFMSY

SEQ ID NO: 41077 - protein, 7 aa, synthetic construct
FFAGIRE

SEQ ID NO: 41078 - protein, 7 aa, synthetic construct
RGERCPD

SEQ ID NO: 41079 - protein, 7 aa, synthetic construct
FCRPCSE

SEQ ID NO: 41080 - protein, 7 aa, synthetic construct
YARGDNG

SEQ ID NO: 41081 - protein, 7 aa, synthetic construct
RMDSVVW

SEQ ID NO: 41082 - protein, 7 aa, synthetic construct
YFTGKEE

SEQ ID NO: 41083 - protein, 7 aa, synthetic construct
CRPSPGI

SEQ ID NO: 41084 - protein, 7 aa, synthetic construct
GPMSCKE

SEQ ID NO: 41085 - protein, 7 aa, synthetic construct
WWTGMPD

SEQ ID NO: 41086 - protein, 7 aa, synthetic construct
NTPMCKA

SEQ ID NO: 41087 - protein, 7 aa, synthetic construct
YFVGRTD

SEQ ID NO: 41088 - protein, 7 aa, synthetic construct
YWSGRPE

SEQ ID NO: 41089 - protein, 7 aa, synthetic construct
CKAGCKD

SEQ ID NO: 41090 - protein, 7 aa, synthetic construct
CTSQTGH

SEQ ID NO: 41091 - protein, 7 aa, synthetic construct
VEPTCKD

SEQ ID NO: 41092 - protein, 7 aa, synthetic construct
YFSNVRS

SEQ ID NO: 41093 - protein, 7 aa, synthetic construct
LWNGTAP

SEQ ID NO: 41094 - protein, 7 aa, synthetic construct
CRESTER

SEQ ID NO: 41095 - protein, 7 aa, synthetic construct
LGLGCCG

SEQ ID NO: 41096 - protein, 7 aa, synthetic construct
CSRIGPN

SEQ ID NO: 41097 - protein, 7 aa, synthetic construct
VPQRCAP

SEQ ID NO: 41098 - protein, 7 aa, synthetic construct
CKKDKEV

SEQ ID NO: 41099 - protein, 7 aa, synthetic construct
CAPYTHE

SEQ ID NO: 41100 - protein, 7 aa, synthetic construct
YFAGRAE

SEQ ID NO: 41101 - protein, 7 aa, synthetic construct
YFSGLMA

SEQ ID NO: 41102 - protein, 7 aa, synthetic construct
FDGSCKA

SEQ ID NO: 41103 - protein, 7 aa, synthetic construct
RGETSSW

SEQ ID NO: 41104 - protein, 7 aa, synthetic construct
YYSGVAL

SEQ ID NO: 41105 - protein, 7 aa, synthetic construct
SDGVSAW

SEQ ID NO: 41106 - protein, 7 aa, synthetic construct
GSEFKSY

SEQ ID NO: 41107 - protein, 7 aa, synthetic construct
TGDWTPF

SEQ ID NO: 41108 - protein, 7 aa, synthetic construct
FWSGTFE

SEQ ID NO: 41109 - protein, 7 aa, synthetic construct
CTSKIGH

SEQ ID NO: 41110 - protein, 7 aa, synthetic construct
SMRDRSW

SEQ ID NO: 41111 - protein, 7 aa, synthetic construct
GDEYIMY

SEQ ID NO: 41112 - protein, 7 aa, synthetic construct
VPTTPCM

SEQ ID NO: 41113 - protein, 7 aa, synthetic construct
PMGSAEW

SEQ ID NO: 41114 - protein, 7 aa, synthetic construct
YSRLDYD

SEQ ID NO: 41115 - protein, 7 aa, synthetic construct
DDGVSKW

SEQ ID NO: 41116 - protein, 7 aa, synthetic construct
MTGTSCS

SEQ ID NO: 41117 - protein, 7 aa, synthetic construct
YFTGHTM

SEQ ID NO: 41118 - protein, 7 aa, synthetic construct
YYTGQVT

SEQ ID NO: 41119 - protein, 7 aa, synthetic construct
IDGSCKA

SEQ ID NO: 41120 - protein, 7 aa, synthetic construct
QCRPCSE

SEQ ID NO: 41121 - protein, 7 aa, synthetic construct
RSEYHFP

SEQ ID NO: 41122 - protein, 7 aa, synthetic construct
VKPDNTC

SEQ ID NO: 41123 - protein, 7 aa, synthetic construct
CKPGPIG

SEQ ID NO: 41124 - protein, 7 aa, synthetic construct
QTGGGSC

SEQ ID NO: 41125 - protein, 7 aa, synthetic construct
YWAGIPE

SEQ ID NO: 41126 - protein, 7 aa, synthetic construct
CNKAMTA

SEQ ID NO: 41127 - protein, 7 aa, synthetic construct
CKMSCPL

SEQ ID NO: 41128 - protein, 7 aa, synthetic construct
CKGLKVE

SEQ ID NO: 41129 - protein, 7 aa, synthetic construct
RQTACPA

SEQ ID NO: 41130 - protein, 7 aa, synthetic construct
TFYGDAA

SEQ ID NO: 41131 - protein, 7 aa, synthetic construct
EEEKCRE

SEQ ID NO: 41132 - protein, 7 aa, synthetic construct
FFHGKVE

SEQ ID NO: 41133 - protein, 7 aa, synthetic construct
YWTAKPD

SEQ ID NO: 41134 - protein, 7 aa, synthetic construct
CFSKTGH

SEQ ID NO: 41135 - protein, 7 aa, synthetic construct
IDSGKAC

SEQ ID NO: 41136 - protein, 7 aa, synthetic construct
MERTQMC

SEQ ID NO: 41137 - protein, 7 aa, synthetic construct
YARGSIN

SEQ ID NO: 41138 - protein, 7 aa, synthetic construct
LHRLHQD

SEQ ID NO: 41139 - protein, 7 aa, synthetic construct
RTWDAIV

SEQ ID NO: 41140 - protein, 7 aa, synthetic construct
VKSSEAC

SEQ ID NO: 41141 - protein, 7 aa, synthetic construct
PGPMKPC

SEQ ID NO: 41142 - protein, 7 aa, synthetic construct
CNHPMTA

SEQ ID NO: 41143 - protein, 7 aa, synthetic construct
RSETSSW

SEQ ID NO: 41144 - protein, 7 aa, synthetic construct
LPRTGDC

SEQ ID NO: 41145 - protein, 7 aa, synthetic construct
KEGTSRW

SEQ ID NO: 41146 - protein, 7 aa, synthetic construct
KADHLKW

SEQ ID NO: 41147 - protein, 7 aa, synthetic construct
DRKPCPA

SEQ ID NO: 41148 - protein, 7 aa, synthetic construct
YFTHRYD

SEQ ID NO: 41149 - protein, 7 aa, synthetic construct
YHRLDND

SEQ ID NO: 41150 - protein, 7 aa, synthetic construct
AGATSTW

SEQ ID NO: 41151 - protein, 7 aa, synthetic construct
CKARPCG

SEQ ID NO: 41152 - protein, 7 aa, synthetic construct
RSEFTVF

SEQ ID NO: 41153 - protein, 7 aa, synthetic construct
CKASKCA

SEQ ID NO: 41154 - protein, 7 aa, synthetic construct
CKTITND

SEQ ID NO: 41155 - protein, 7 aa, synthetic construct
CNKPQTA

SEQ ID NO: 41156 - protein, 7 aa, synthetic construct
HDDFTVM

SEQ ID NO: 41157 - protein, 7 aa, synthetic construct
NKSEGAC

SEQ ID NO: 41158 - protein, 7 aa, synthetic construct
PFARSAE

SEQ ID NO: 41159 - protein, 7 aa, synthetic construct
FFSGRHE

SEQ ID NO: 41160 - protein, 7 aa, synthetic construct
YWSAKLD

SEQ ID NO: 41161 - protein, 7 aa, synthetic construct
YWSGTRA

SEQ ID NO: 41162 - protein, 7 aa, synthetic construct
CNKMMTA

SEQ ID NO: 41163 - protein, 7 aa, synthetic construct
GGGTVRW

SEQ ID NO: 41164 - protein, 7 aa, synthetic construct
WTGMCKA

SEQ ID NO: 41165 - protein, 7 aa, synthetic construct
CAPYLHS

SEQ ID NO: 41166 - protein, 7 aa, synthetic construct
TNNAKDC

SEQ ID NO: 41167 - protein, 7 aa, synthetic construct
YWSEIRA

SEQ ID NO: 41168 - protein, 7 aa, synthetic construct
TNREGEC

SEQ ID NO: 41169 - protein, 7 aa, synthetic construct
CQSKNGV

SEQ ID NO: 41170 - protein, 7 aa, synthetic construct
YYTGISE

SEQ ID NO: 41171 - protein, 7 aa, synthetic construct
FSTHCCA

SEQ ID NO: 41172 - protein, 7 aa, synthetic construct
ILKSCPI

SEQ ID NO: 41173 - protein, 7 aa, synthetic construct
RSEFRSY

SEQ ID NO: 41174 - protein, 7 aa, synthetic construct
WLKSQGN

SEQ ID NO: 41175 - protein, 7 aa, synthetic construct
RTPTCKE

SEQ ID NO: 41176 - protein, 7 aa, synthetic construct
YWGGVTA

SEQ ID NO: 41177 - protein, 7 aa, synthetic construct
GNEAGKC

SEQ ID NO: 41178 - protein, 7 aa, synthetic construct
YFSGMTS

SEQ ID NO: 41179 - protein, 7 aa, synthetic construct
CKTSPLG

SEQ ID NO: 41180 - protein, 7 aa, synthetic construct
GSEFRSW

SEQ ID NO: 41181 - protein, 7 aa, synthetic construct
GCGTKIG

SEQ ID NO: 41182 - protein, 7 aa, synthetic construct
WWHGKPD

SEQ ID NO: 41183 - protein, 7 aa, synthetic construct
CKIPEKV

SEQ ID NO: 41184 - protein, 7 aa, synthetic construct
LWNGTPS

SEQ ID NO: 41185 - protein, 7 aa, synthetic construct
RGGSSGW

SEQ ID NO: 41186 - protein, 7 aa, synthetic construct
MTGTQCL

SEQ ID NO: 41187 - protein, 7 aa, synthetic construct
YWSGIPP

SEQ ID NO: 41188 - protein, 7 aa, synthetic construct
QSKASEC

SEQ ID NO: 41189 - protein, 7 aa, synthetic construct
GGESVRW

SEQ ID NO: 41190 - protein, 7 aa, synthetic construct
FFTGVLA

SEQ ID NO: 41191 - protein, 7 aa, synthetic construct
WNPMCKA

SEQ ID NO: 41192 - protein, 7 aa, synthetic construct
TKEQGDC

SEQ ID NO: 41193 - protein, 7 aa, synthetic construct
YWSQVIE

SEQ ID NO: 41194 - protein, 7 aa, synthetic construct
LPKDKCP

SEQ ID NO: 41195 - protein, 7 aa, synthetic construct
GGGSSKW

SEQ ID NO: 41196 - protein, 7 aa, synthetic construct
KDDYVPW

SEQ ID NO: 41197 - protein, 7 aa, synthetic construct
VPMLGAG

SEQ ID NO: 41198 - protein, 7 aa, synthetic construct
YFSGRED

SEQ ID NO: 41199 - protein, 7 aa, synthetic construct
YHALNKP

SEQ ID NO: 41200 - protein, 7 aa, synthetic construct
GDEYLMF

SEQ ID NO: 41201 - protein, 7 aa, synthetic construct
DLRTAAW

SEQ ID NO: 41202 - protein, 7 aa, synthetic construct
GGTGSSW

SEQ ID NO: 41203 - protein, 7 aa, synthetic construct
YARNSDN

SEQ ID NO: 41204 - protein, 7 aa, synthetic construct
YFSGREE

SEQ ID NO: 41205 - protein, 7 aa, synthetic construct
RGDSSRW

SEQ ID NO: 41206 - protein, 7 aa, synthetic construct
CKKGSLE

SEQ ID NO: 41207 - protein, 7 aa, synthetic construct
CTSKSGH

SEQ ID NO: 41208 - protein, 7 aa, synthetic construct
SCKPCPG

SEQ ID NO: 41209 - protein, 7 aa, synthetic construct
IDAANKC

SEQ ID NO: 41210 - protein, 7 aa, synthetic construct
YWNGIQA

SEQ ID NO: 41211 - protein, 7 aa, synthetic construct
YSRLSPE

SEQ ID NO: 41212 - protein, 7 aa, synthetic construct
REDHTSW

SEQ ID NO: 41213 - protein, 7 aa, synthetic construct
QKTNTGC

SEQ ID NO: 41214 - protein, 7 aa, synthetic construct
CTSKTGE

SEQ ID NO: 41215 - protein, 7 aa, synthetic construct
VKRSDEC

SEQ ID NO: 41216 - protein, 7 aa, synthetic construct
RLMDSYP

SEQ ID NO: 41217 - protein, 7 aa, synthetic construct
CLKMCPP

SEQ ID NO: 41218 - protein, 7 aa, synthetic construct
CKAQTPG

SEQ ID NO: 41219 - protein, 7 aa, synthetic construct
CKPDSRW

SEQ ID NO: 41220 - protein, 7 aa, synthetic construct
CKPMTID

SEQ ID NO: 41221 - protein, 7 aa, synthetic construct
YGNQREC

SEQ ID NO: 41222 - protein, 7 aa, synthetic construct
RDGSCKA

SEQ ID NO: 41223 - protein, 7 aa, synthetic construct
YFQGIHE

SEQ ID NO: 41224 - protein, 7 aa, synthetic construct
GKDKADC

SEQ ID NO: 41225 - protein, 7 aa, synthetic construct
QSGKNEC

SEQ ID NO: 41226 - protein, 7 aa, synthetic construct
NAKNEGC

SEQ ID NO: 41227 - protein, 7 aa, synthetic construct
CKPICAG

SEQ ID NO: 41228 - protein, 7 aa, synthetic construct
VPDYVAY

SEQ ID NO: 41229 - protein, 7 aa, synthetic construct
IPEVCCG

SEQ ID NO: 41230 - protein, 7 aa, synthetic construct
SMDSRSW

SEQ ID NO: 41231 - protein, 7 aa, synthetic construct
IKDQSGC

SEQ ID NO: 41232 - protein, 7 aa, synthetic construct
QQPKETC

SEQ ID NO: 41233 - protein, 7 aa, synthetic construct
YVKVCKD

SEQ ID NO: 41234 - protein, 7 aa, synthetic construct
YTKLDMN

SEQ ID NO: 41235 - protein, 7 aa, synthetic construct
CKPTSLN

SEQ ID NO: 41236 - protein, 7 aa, synthetic construct
GCGTKMG

SEQ ID NO: 41237 - protein, 7 aa, synthetic construct
CKALSRE

SEQ ID NO: 41238 - protein, 7 aa, synthetic construct
LWKECKP

SEQ ID NO: 41239 - protein, 7 aa, synthetic construct
YTPGCKE

SEQ ID NO: 41240 - protein, 7 aa, synthetic construct
YWGGITE

SEQ ID NO: 41241 - protein, 7 aa, synthetic construct
RSDFIPF

SEQ ID NO: 41242 - protein, 7 aa, synthetic construct
PKGPCDA

SEQ ID NO: 41243 - protein, 7 aa, synthetic construct
CPPKKTD

SEQ ID NO: 41244 - protein, 7 aa, synthetic construct
WFSGQRE

SEQ ID NO: 41245 - protein, 7 aa, synthetic construct
CKPGTVM

SEQ ID NO: 41246 - protein, 7 aa, synthetic construct
VNDFKIF

SEQ ID NO: 41247 - protein, 7 aa, synthetic construct
CKTFSKE

SEQ ID NO: 41248 - protein, 7 aa, synthetic construct
CKKNGME

SEQ ID NO: 41249 - protein, 7 aa, synthetic construct
LPRPCSE

SEQ ID NO: 41250 - protein, 7 aa, synthetic construct
AHCKGPE

SEQ ID NO: 41251 - protein, 7 aa, synthetic construct
REPTCPR

SEQ ID NO: 41252 - protein, 7 aa, synthetic construct
YMPGCKE

SEQ ID NO: 41253 - protein, 7 aa, synthetic construct
VPEKCPG

SEQ ID NO: 41254 - protein, 7 aa, synthetic construct
GEPGVRW

SEQ ID NO: 41255 - protein, 7 aa, synthetic construct
CKVISPP

SEQ ID NO: 41256 - protein, 7 aa, synthetic construct
RLESSLW

SEQ ID NO: 41257 - protein, 7 aa, synthetic construct
RTPTCAA

SEQ ID NO: 41258 - protein, 7 aa, synthetic construct
YFSGTIT

SEQ ID NO: 41259 - protein, 7 aa, synthetic construct
LWDGTEA

SEQ ID NO: 41260 - protein, 7 aa, synthetic construct
HPETKCP

SEQ ID NO: 41261 - protein, 7 aa, synthetic construct
CISKTGH

SEQ ID NO: 41262 - protein, 7 aa, synthetic construct
ISEFKIY

SEQ ID NO: 41263 - protein, 7 aa, synthetic construct
WWHGRPE

SEQ ID NO: 41264 - protein, 7 aa, synthetic construct
RDDFISF

SEQ ID NO: 41265 - protein, 7 aa, synthetic construct
VSTHICA

SEQ ID NO: 41266 - protein, 7 aa, synthetic construct
CRPEAKS

SEQ ID NO: 41267 - protein, 7 aa, synthetic construct
YGKVGCQ

SEQ ID NO: 41268 - protein, 7 aa, synthetic construct
CKKQLQD

SEQ ID NO: 41269 - protein, 7 aa, synthetic construct
CKPGTLD

SEQ ID NO: 41270 - protein, 7 aa, synthetic construct
CKPRSGE

SEQ ID NO: 41271 - protein, 7 aa, synthetic construct
CTSKTGP

SEQ ID NO: 41272 - protein, 7 aa, synthetic construct
YFQGVIA

SEQ ID NO: 41273 - protein, 7 aa, synthetic construct
YEPPCKE

SEQ ID NO: 41274 - protein, 7 aa, synthetic construct
YFQGIPL

SEQ ID NO: 41275 - protein, 7 aa, synthetic construct
YFQGVRD

SEQ ID NO: 41276 - protein, 7 aa, synthetic construct
CTPDYRE

SEQ ID NO: 41277 - protein, 7 aa, synthetic construct
RSEYTVY

SEQ ID NO: 41278 - protein, 7 aa, synthetic construct
FFSGTHE

SEQ ID NO: 41279 - protein, 7 aa, synthetic construct
KNEYVKW

SEQ ID NO: 41280 - protein, 7 aa, synthetic construct
CNKPMVA

SEQ ID NO: 41281 - protein, 7 aa, synthetic construct
FWSGTID

SEQ ID NO: 41282 - protein, 7 aa, synthetic construct
CKMDNTP

SEQ ID NO: 41283 - protein, 7 aa, synthetic construct
YKEPCIS

SEQ ID NO: 41284 - protein, 7 aa, synthetic construct
YFSGTQR

SEQ ID NO: 41285 - protein, 7 aa, synthetic construct
LCRPMSE

SEQ ID NO: 41286 - protein, 7 aa, synthetic construct
RTPTLYP

SEQ ID NO: 41287 - protein, 7 aa, synthetic construct
YFTGSMD

SEQ ID NO: 41288 - protein, 7 aa, synthetic construct
YFTGMQS

SEQ ID NO: 41289 - protein, 7 aa, synthetic construct
YEPGCKQ

SEQ ID NO: 41290 - protein, 7 aa, synthetic construct
KDDYKTW

SEQ ID NO: 41291 - protein, 7 aa, synthetic construct
FFSGQHE

SEQ ID NO: 41292 - protein, 7 aa, synthetic construct
NMSEAKW

SEQ ID NO: 41293 - protein, 7 aa, synthetic construct
QTKSEQC

SEQ ID NO: 41294 - protein, 7 aa, synthetic construct
SMGDRSW

SEQ ID NO: 41295 - protein, 7 aa, synthetic construct
RLEASVW

SEQ ID NO: 41296 - protein, 7 aa, synthetic construct
CKPGVPP

SEQ ID NO: 41297 - protein, 7 aa, synthetic construct
RTAGVFP

SEQ ID NO: 41298 - protein, 7 aa, synthetic construct
CETKKPS

SEQ ID NO: 41299 - protein, 7 aa, synthetic construct
WWTGTLE

SEQ ID NO: 41300 - protein, 7 aa, synthetic construct
CDKTCSP

SEQ ID NO: 41301 - protein, 7 aa, synthetic construct
YFMGIPA

SEQ ID NO: 41302 - protein, 7 aa, synthetic construct
YWSGTSS

SEQ ID NO: 41303 - protein, 7 aa, synthetic construct
DRRGCCA

SEQ ID NO: 41304 - protein, 7 aa, synthetic construct
CGGIKPP

SEQ ID NO: 41305 - protein, 7 aa, synthetic construct
SDGHSKW

SEQ ID NO: 41306 - protein, 7 aa, synthetic construct
KNGTSSW

SEQ ID NO: 41307 - protein, 7 aa, synthetic construct
YLKSQYY

SEQ ID NO: 41308 - protein, 7 aa, synthetic construct
DGYSREW

SEQ ID NO: 41309 - protein, 7 aa, synthetic construct
TDGTVKC

SEQ ID NO: 41310 - protein, 7 aa, synthetic construct
REDWSTY

SEQ ID NO: 41311 - protein, 7 aa, synthetic construct
ITSFNGI

SEQ ID NO: 41312 - protein, 7 aa, synthetic construct
YRSTNGV

SEQ ID NO: 41313 - protein, 7 aa, synthetic construct
YFAGKPD

SEQ ID NO: 41314 - protein, 7 aa, synthetic construct
CKLQPKP

SEQ ID NO: 41315 - protein, 7 aa, synthetic construct
MWDGTFA

SEQ ID NO: 41316 - protein, 7 aa, synthetic construct
YFTGLVA

SEQ ID NO: 41317 - protein, 7 aa, synthetic construct
GSEFDHW

SEQ ID NO: 41318 - protein, 7 aa, synthetic construct
YWSGQVS

SEQ ID NO: 41319 - protein, 7 aa, synthetic construct
KNDYNTW

SEQ ID NO: 41320 - protein, 7 aa, synthetic construct
WFSGISE

SEQ ID NO: 41321 - protein, 7 aa, synthetic construct
CSKENRE

SEQ ID NO: 41322 - protein, 7 aa, synthetic construct
LPDSVRW

SEQ ID NO: 41323 - protein, 7 aa, synthetic construct
FFTGRTD

SEQ ID NO: 41324 - protein, 7 aa, synthetic construct
CKMNCMG

SEQ ID NO: 41325 - protein, 7 aa, synthetic construct
RDEFTLW

SEQ ID NO: 41326 - protein, 7 aa, synthetic construct
CKSLKTE

SEQ ID NO: 41327 - protein, 7 aa, synthetic construct
CNKPMDA

SEQ ID NO: 41328 - protein, 7 aa, synthetic construct
KQNATGC

SEQ ID NO: 41329 - protein, 7 aa, synthetic construct
CLPRCVA

SEQ ID NO: 41330 - protein, 7 aa, synthetic construct
RDEYQTW

SEQ ID NO: 41331 - protein, 7 aa, synthetic construct
GCKPQMG

SEQ ID NO: 41332 - protein, 7 aa, synthetic construct
LHRLTEG

SEQ ID NO: 41333 - protein, 7 aa, synthetic construct
YYTGTID

SEQ ID NO: 41334 - protein, 7 aa, synthetic construct
CKIPSKE

SEQ ID NO: 41335 - protein, 7 aa, synthetic construct
ISLTQSF

SEQ ID NO: 41336 - protein, 7 aa, synthetic construct
CLPLCGP

SEQ ID NO: 41337 - protein, 7 aa, synthetic construct
YWSEVKE

SEQ ID NO: 41338 - protein, 7 aa, synthetic construct
LMKSCLP

SEQ ID NO: 41339 - protein, 7 aa, synthetic construct
CQDDKKG

SEQ ID NO: 41340 - protein, 7 aa, synthetic construct
RDDWSTW

SEQ ID NO: 41341 - protein, 7 aa, synthetic construct
CAKPMTA

SEQ ID NO: 41342 - protein, 7 aa, synthetic construct
GGGWTMG

SEQ ID NO: 41343 - protein, 7 aa, synthetic construct
KASNEAC

SEQ ID NO: 41344 - protein, 7 aa, synthetic construct
FAKSKAN

SEQ ID NO: 41345 - protein, 7 aa, synthetic construct
LVKSQPC

SEQ ID NO: 41346 - protein, 7 aa, synthetic construct
CNKPMGA

SEQ ID NO: 41347 - protein, 7 aa, synthetic construct
WVKSQPL

SEQ ID NO: 41348 - protein, 7 aa, synthetic construct
VPEGCHG

SEQ ID NO: 41349 - protein, 7 aa, synthetic construct
YFAGRND

SEQ ID NO: 41350 - protein, 7 aa, synthetic construct
KDSYHIF

SEQ ID NO: 41351 - protein, 7 aa, synthetic construct
TAGMKCI

SEQ ID NO: 41352 - protein, 7 aa, synthetic construct
SQETCKF

SEQ ID NO: 41353 - protein, 7 aa, synthetic construct
IPETRCA

SEQ ID NO: 41354 - protein, 7 aa, synthetic construct
CTSGTGH

SEQ ID NO: 41355 - protein, 7 aa, synthetic construct
CDGSSKA

SEQ ID NO: 41356 - protein, 7 aa, synthetic construct
VKKYGPD

SEQ ID NO: 41357 - protein, 7 aa, synthetic construct
YKSQQDC

SEQ ID NO: 41358 - protein, 7 aa, synthetic construct
IGGKCPF

SEQ ID NO: 41359 - protein, 7 aa, synthetic construct
CNKPMTY

SEQ ID NO: 41360 - protein, 7 aa, synthetic construct
RDEASAW

SEQ ID NO: 41361 - protein, 7 aa, synthetic construct
YTPMCKA

SEQ ID NO: 41362 - protein, 7 aa, synthetic construct
CNLPMTA

SEQ ID NO: 41363 - protein, 7 aa, synthetic construct
TKESVPC

SEQ ID NO: 41364 - protein, 7 aa, synthetic construct
TSTDNKC

SEQ ID NO: 41365 - protein, 7 aa, synthetic construct
QKHEAEC

SEQ ID NO: 41366 - protein, 7 aa, synthetic construct
CAKCPRP

SEQ ID NO: 41367 - protein, 7 aa, synthetic construct
EDGTSKW

SEQ ID NO: 41368 - protein, 7 aa, synthetic construct
CNKPMTP

SEQ ID NO: 41369 - protein, 7 aa, synthetic construct
KKDITCA

SEQ ID NO: 41370 - protein, 7 aa, synthetic construct
LTKPCLT

SEQ ID NO: 41371 - protein, 7 aa, synthetic construct
GNGGSPC

SEQ ID NO: 41372 - protein, 7 aa, synthetic construct
CNKPMQA

SEQ ID NO: 41373 - protein, 7 aa, synthetic construct
YAKCNSN

SEQ ID NO: 41374 - protein, 7 aa, synthetic construct
CKPSKLE

SEQ ID NO: 41375 - protein, 7 aa, synthetic construct
IKSNGDC

SEQ ID NO: 41376 - protein, 7 aa, synthetic construct
CKDKPQV

SEQ ID NO: 41377 - protein, 7 aa, synthetic construct
MTGSSCL

SEQ ID NO: 41378 - protein, 7 aa, synthetic construct
RGEDAYP

SEQ ID NO: 41379 - protein, 7 aa, synthetic construct
CKPPMVS

SEQ ID NO: 41380 - protein, 7 aa, synthetic construct
VPECMKP

SEQ ID NO: 41381 - protein, 7 aa, synthetic construct
MHGTSCL

SEQ ID NO: 41382 - protein, 7 aa, synthetic construct
YWTGEKE

SEQ ID NO: 41383 - protein, 7 aa, synthetic construct
YGKGETC

SEQ ID NO: 41384 - protein, 7 aa, synthetic construct
GSPGNSW

SEQ ID NO: 41385 - protein, 7 aa, synthetic construct
CKPCPLR

SEQ ID NO: 41386 - protein, 7 aa, synthetic construct
REGSSYW

SEQ ID NO: 41387 - protein, 7 aa, synthetic construct
FFSGRYD

SEQ ID NO: 41388 - protein, 7 aa, synthetic construct
CPSKTGH

SEQ ID NO: 41389 - protein, 7 aa, synthetic construct
GIETSRW

SEQ ID NO: 41390 - protein, 7 aa, synthetic construct
CNKPMSA

SEQ ID NO: 41391 - protein, 7 aa, synthetic construct
LLSDRVW

SEQ ID NO: 41392 - protein, 7 aa, synthetic construct
WTQMCKA

SEQ ID NO: 41393 - protein, 7 aa, synthetic construct
YWSHIKD

SEQ ID NO: 41394 - protein, 7 aa, synthetic construct
MTGTSCA

SEQ ID NO: 41395 - protein, 7 aa, synthetic construct
RDELVFP

SEQ ID NO: 41396 - protein, 7 aa, synthetic construct
VAQGCKP

SEQ ID NO: 41397 - protein, 7 aa, synthetic construct
TQESNKC

SEQ ID NO: 41398 - protein, 7 aa, synthetic construct
CAITPCG

SEQ ID NO: 41399 - protein, 7 aa, synthetic construct
RDAVSSW

SEQ ID NO: 41400 - protein, 7 aa, synthetic construct
RTEFHSF

SEQ ID NO: 41401 - protein, 7 aa, synthetic construct
RDNGVRW

SEQ ID NO: 41402 - protein, 7 aa, synthetic construct
VLSDVKW

SEQ ID NO: 41403 - protein, 7 aa, synthetic construct
FKKMNYN

SEQ ID NO: 41404 - protein, 7 aa, synthetic construct
CDGSWKA

SEQ ID NO: 41405 - protein, 7 aa, synthetic construct
CEGKKEA

SEQ ID NO: 41406 - protein, 7 aa, synthetic construct
KNDHVKW

SEQ ID NO: 41407 - protein, 7 aa, synthetic construct
YYQGIRA

SEQ ID NO: 41408 - protein, 7 aa, synthetic construct
KQDSGQC

SEQ ID NO: 41409 - protein, 7 aa, synthetic construct
VDEFRHF

SEQ ID NO: 41410 - protein, 7 aa, synthetic construct
EEDWSKW

SEQ ID NO: 41411 - protein, 7 aa, synthetic construct
CNGAGPS

SEQ ID NO: 41412 - protein, 7 aa, synthetic construct
YEHGCKE

SEQ ID NO: 41413 - protein, 7 aa, synthetic construct
ITEQKNC

SEQ ID NO: 41414 - protein, 7 aa, synthetic construct
YYSGMRD

SEQ ID NO: 41415 - protein, 7 aa, synthetic construct
PGPERKW

SEQ ID NO: 41416 - protein, 7 aa, synthetic construct
VCKPCLT

SEQ ID NO: 41417 - protein, 7 aa, synthetic construct
VGGTCKY

SEQ ID NO: 41418 - protein, 7 aa, synthetic construct
YFSGLVS

SEQ ID NO: 41419 - protein, 7 aa, synthetic construct
GGGTTRW

SEQ ID NO: 41420 - protein, 7 aa, synthetic construct
CAPVYRE

SEQ ID NO: 41421 - protein, 7 aa, synthetic construct
TKQNGNC

SEQ ID NO: 41422 - protein, 7 aa, synthetic construct
PYSRSIE

SEQ ID NO: 41423 - protein, 7 aa, synthetic construct
GVGGCKP

SEQ ID NO: 41424 - protein, 7 aa, synthetic construct
YEPGCKH

SEQ ID NO: 41425 - protein, 7 aa, synthetic construct
PAPGCMK

SEQ ID NO: 41426 - protein, 7 aa, synthetic construct
GSGTSVW

SEQ ID NO: 41427 - protein, 7 aa, synthetic construct
YWSGQHE

SEQ ID NO: 41428 - protein, 7 aa, synthetic construct
FFSGMRD

SEQ ID NO: 41429 - protein, 7 aa, synthetic construct
CKTECVA

SEQ ID NO: 41430 - protein, 7 aa, synthetic construct
CTSETGH

SEQ ID NO: 41431 - protein, 7 aa, synthetic construct
MGDSSKC

SEQ ID NO: 41432 - protein, 7 aa, synthetic construct
CLPGCLP

SEQ ID NO: 41433 - protein, 7 aa, synthetic construct
WTPMCKG

SEQ ID NO: 41434 - protein, 7 aa, synthetic construct
RDGGSSW

SEQ ID NO: 41435 - protein, 7 aa, synthetic construct
IDEWKGW

SEQ ID NO: 41436 - protein, 7 aa, synthetic construct
YWSGIHN

SEQ ID NO: 41437 - protein, 7 aa, synthetic construct
RQEGVRW

SEQ ID NO: 41438 - protein, 7 aa, synthetic construct
YWQGMRE

SEQ ID NO: 41439 - protein, 7 aa, synthetic construct
GGETSLW

SEQ ID NO: 41440 - protein, 7 aa, synthetic construct
YFAGVLS

SEQ ID NO: 41441 - protein, 7 aa, synthetic construct
GCGTKGG

SEQ ID NO: 41442 - protein, 7 aa, synthetic construct
GGPTSAW

SEQ ID NO: 41443 - protein, 7 aa, synthetic construct
KNGYSSY

SEQ ID NO: 41444 - protein, 7 aa, synthetic construct
VSTHCSA

SEQ ID NO: 41445 - protein, 7 aa, synthetic construct
CYSKTGH

SEQ ID NO: 41446 - protein, 7 aa, synthetic construct
YWSSVRD

SEQ ID NO: 41447 - protein, 7 aa, synthetic construct
LFKECGG

SEQ ID NO: 41448 - protein, 7 aa, synthetic construct
FFSGIVG

SEQ ID NO: 41449 - protein, 7 aa, synthetic construct
YFTGSRS

SEQ ID NO: 41450 - protein, 7 aa, synthetic construct
IGMKGWD

SEQ ID NO: 41451 - protein, 7 aa, synthetic construct
EMESVRW

SEQ ID NO: 41452 - protein, 7 aa, synthetic construct
CDGSAKA

SEQ ID NO: 41453 - protein, 7 aa, synthetic construct
RGGQSTW

SEQ ID NO: 41454 - protein, 7 aa, synthetic construct
LWSGVGP

SEQ ID NO: 41455 - protein, 7 aa, synthetic construct
GGETSVW

SEQ ID NO: 41456 - protein, 7 aa, synthetic construct
YFSGRSL

SEQ ID NO: 41457 - protein, 7 aa, synthetic construct
GCDFRPE

SEQ ID NO: 41458 - protein, 7 aa, synthetic construct
RSEFTPF

SEQ ID NO: 41459 - protein, 7 aa, synthetic construct
YDGGKPC

SEQ ID NO: 41460 - protein, 7 aa, synthetic construct
YWSKVAD

SEQ ID NO: 41461 - protein, 7 aa, synthetic construct
RTYDTVV

SEQ ID NO: 41462 - protein, 7 aa, synthetic construct
KTGNEGC

SEQ ID NO: 41463 - protein, 7 aa, synthetic construct
NWARSLE

SEQ ID NO: 41464 - protein, 7 aa, synthetic construct
VCMPQKP

SEQ ID NO: 41465 - protein, 7 aa, synthetic construct
KNGTSAW

SEQ ID NO: 41466 - protein, 7 aa, synthetic construct
RNGASSW

SEQ ID NO: 41467 - protein, 7 aa, synthetic construct
RSEFTSF

SEQ ID NO: 41468 - protein, 7 aa, synthetic construct
CKVPKMP

SEQ ID NO: 41469 - protein, 7 aa, synthetic construct
WFSGRHA

SEQ ID NO: 41470 - protein, 7 aa, synthetic construct
GVNQVRW

SEQ ID NO: 41471 - protein, 7 aa, synthetic construct
CRVEKPP

SEQ ID NO: 41472 - protein, 7 aa, synthetic construct
RGEGVRW

SEQ ID NO: 41473 - protein, 7 aa, synthetic construct
TREGDPP

SEQ ID NO: 41474 - protein, 7 aa, synthetic construct
YFSGVLT

SEQ ID NO: 41475 - protein, 7 aa, synthetic construct
CTTKTGH

SEQ ID NO: 41476 - protein, 7 aa, synthetic construct
RGEFVSW

SEQ ID NO: 41477 - protein, 7 aa, synthetic construct
VEPGCKE

SEQ ID NO: 41478 - protein, 7 aa, synthetic construct
KDGSSYW

SEQ ID NO: 41479 - protein, 7 aa, synthetic construct
KDEFQTY

SEQ ID NO: 41480 - protein, 7 aa, synthetic construct
PHPKCPF

SEQ ID NO: 41481 - protein, 7 aa, synthetic construct
GGEFVHW

SEQ ID NO: 41482 - protein, 7 aa, synthetic construct
GSEFITF

SEQ ID NO: 41483 - protein, 7 aa, synthetic construct
CNSKTGH

SEQ ID NO: 41484 - protein, 7 aa, synthetic construct
YHRNSDN

SEQ ID NO: 41485 - protein, 7 aa, synthetic construct
DLNSRGW

SEQ ID NO: 41486 - protein, 7 aa, synthetic construct
RDAFVSY

SEQ ID NO: 41487 - protein, 7 aa, synthetic construct
GAGTSHW

SEQ ID NO: 41488 - protein, 7 aa, synthetic construct
YVRSQDF

SEQ ID NO: 41489 - protein, 7 aa, synthetic construct
RESTNGR

SEQ ID NO: 41490 - protein, 7 aa, synthetic construct
REETRYW

SEQ ID NO: 41491 - protein, 7 aa, synthetic construct
CGKPMTA

SEQ ID NO: 41492 - protein, 7 aa, synthetic construct
YYSGTRA

SEQ ID NO: 41493 - protein, 7 aa, synthetic construct
SSPGVRW

SEQ ID NO: 41494 - protein, 7 aa, synthetic construct
YYTGYKE

SEQ ID NO: 41495 - protein, 7 aa, synthetic construct
VMSDNGI

SEQ ID NO: 41496 - protein, 7 aa, synthetic construct
RGEFTVW

SEQ ID NO: 41497 - protein, 7 aa, synthetic construct
RMEAVKW

SEQ ID NO: 41498 - protein, 7 aa, synthetic construct
YIKSDTG

SEQ ID NO: 41499 - protein, 7 aa, synthetic construct
YYSGVRN

SEQ ID NO: 41500 - protein, 7 aa, synthetic construct
LWTGVGP

SEQ ID NO: 41501 - protein, 7 aa, synthetic construct
QWARSLE

SEQ ID NO: 41502 - protein, 7 aa, synthetic construct
GVGTSRW

SEQ ID NO: 41503 - protein, 7 aa, synthetic construct
YWSGERE

SEQ ID NO: 41504 - protein, 7 aa, synthetic construct
CNKPMTQ

SEQ ID NO: 41505 - protein, 7 aa, synthetic construct
GGGTSTW

SEQ ID NO: 41506 - protein, 7 aa, synthetic construct
KDGYTTW

SEQ ID NO: 41507 - protein, 7 aa, synthetic construct
RMSTNGI

SEQ ID NO: 41508 - protein, 7 aa, synthetic construct
QRDGTPA

SEQ ID NO: 41509 - protein, 7 aa, synthetic construct
RGAGVYP

SEQ ID NO: 41510 - protein, 7 aa, synthetic construct
YFAGVKV

SEQ ID NO: 41511 - protein, 7 aa, synthetic construct
YYSGQKS

SEQ ID NO: 41512 - protein, 7 aa, synthetic construct
FMDGTPA

SEQ ID NO: 41513 - protein, 7 aa, synthetic construct
LRNGTGP

SEQ ID NO: 41514 - protein, 7 aa, synthetic construct
LWSGEAP

SEQ ID NO: 41515 - protein, 7 aa, synthetic construct
NWARSVE

SEQ ID NO: 41516 - protein, 7 aa, synthetic construct
GCRPCPT

SEQ ID NO: 41517 - protein, 7 aa, synthetic construct
TRWGENA

SEQ ID NO: 41518 - protein, 7 aa, synthetic construct
RTVHTYP

SEQ ID NO: 41519 - protein, 7 aa, synthetic construct
SDGVSYW

SEQ ID NO: 41520 - protein, 7 aa, synthetic construct
WTSDNGI

SEQ ID NO: 41521 - protein, 7 aa, synthetic construct
GGPGTRW

SEQ ID NO: 41522 - protein, 7 aa, synthetic construct
WHSTNGV

SEQ ID NO: 41523 - protein, 7 aa, synthetic construct
GGVSSTW

SEQ ID NO: 41524 - protein, 7 aa, synthetic construct
KDDFQSF

SEQ ID NO: 41525 - protein, 7 aa, synthetic construct
YYSGTRS

SEQ ID NO: 41526 - protein, 7 aa, synthetic construct
YIKSQSY

SEQ ID NO: 41527 - protein, 7 aa, synthetic construct
IDEWQSY

SEQ ID NO: 41528 - protein, 7 aa, synthetic construct
GGEYVTW

SEQ ID NO: 41529 - protein, 7 aa, synthetic construct
PGGTSTW

SEQ ID NO: 41530 - protein, 7 aa, synthetic construct
CKTEARG

SEQ ID NO: 41531 - protein, 7 aa, synthetic construct
YFAGVME

SEQ ID NO: 41532 - protein, 7 aa, synthetic construct
CKPGMRE

SEQ ID NO: 41533 - protein, 7 aa, synthetic construct
RLESTVW

SEQ ID NO: 41534 - protein, 7 aa, synthetic construct
SMQDRRW

SEQ ID NO: 41535 - protein, 7 aa, synthetic construct
FWSGTHD

SEQ ID NO: 41536 - protein, 7 aa, synthetic construct
GGGTSLW

SEQ ID NO: 41537 - protein, 7 aa, synthetic construct
DYESRKW

SEQ ID NO: 41538 - protein, 7 aa, synthetic construct
CKRVQIE

SEQ ID NO: 41539 - protein, 7 aa, synthetic construct
KEDWTPW

SEQ ID NO: 41540 - protein, 7 aa, synthetic construct
EMESVKW

SEQ ID NO: 41541 - protein, 7 aa, synthetic construct
TRYGENA

SEQ ID NO: 41542 - protein, 7 aa, synthetic construct
RSETSYW

SEQ ID NO: 41543 - protein, 7 aa, synthetic construct
RSEFTPY

SEQ ID NO: 41544 - protein, 7 aa, synthetic construct
RSEFSGF

SEQ ID NO: 41545 - protein, 7 aa, synthetic construct
SMQDRAW

SEQ ID NO: 41546 - protein, 7 aa, synthetic construct
RGGEGEC

SEQ ID NO: 41547 - protein, 7 aa, synthetic construct
RGEFLSY

SEQ ID NO: 41548 - protein, 7 aa, synthetic construct
YWSGLPD

SEQ ID NO: 41549 - protein, 7 aa, synthetic construct
VSTHACA

SEQ ID NO: 41550 - protein, 7 aa, synthetic construct
REAVSSW

SEQ ID NO: 41551 - protein, 7 aa, synthetic construct
FWHGTIE

SEQ ID NO: 41552 - protein, 7 aa, synthetic construct
NLESHKW

SEQ ID NO: 41553 - protein, 7 aa, synthetic construct
KDDWNSY

SEQ ID NO: 41554 - protein, 7 aa, synthetic construct
TWEGTNA

SEQ ID NO: 41555 - protein, 7 aa, synthetic construct
TNEFKPW

SEQ ID NO: 41556 - protein, 7 aa, synthetic construct
YFTGMVV

SEQ ID NO: 41557 - protein, 7 aa, synthetic construct
GGISSTW

SEQ ID NO: 41558 - protein, 7 aa, synthetic construct
DWARSPM

SEQ ID NO: 41559 - protein, 7 aa, synthetic construct
CTSKTPH

SEQ ID NO: 41560 - protein, 7 aa, synthetic construct
RGEFHSY

SEQ ID NO: 41561 - protein, 7 aa, synthetic construct
GVEMVRW

SEQ ID NO: 41562 - protein, 7 aa, synthetic construct
IPSSVKW

SEQ ID NO: 41563 - protein, 7 aa, synthetic construct
LRDGSPP

SEQ ID NO: 41564 - protein, 7 aa, synthetic construct
RSEFHPF

SEQ ID NO: 41565 - protein, 7 aa, synthetic construct
TRDGTNA

SEQ ID NO: 41566 - protein, 7 aa, synthetic construct
WLKSQSY

SEQ ID NO: 41567 - protein, 7 aa, synthetic construct
GANTSRW

SEQ ID NO: 41568 - protein, 7 aa, synthetic construct
TWNGDNA

SEQ ID NO: 41569 - protein, 7 aa, synthetic construct
TWTGDIP

SEQ ID NO: 41570 - protein, 7 aa, synthetic construct
NLASAGW

SEQ ID NO: 41571 - protein, 7 aa, synthetic construct
KSDYMSF

SEQ ID NO: 41572 - protein, 7 aa, synthetic construct
AYARSPL

SEQ ID NO: 41573 - protein, 7 aa, synthetic construct
GGPTCKF

SEQ ID NO: 41574 - protein, 7 aa, synthetic construct
GSGNSIW

SEQ ID NO: 41575 - protein, 7 aa, synthetic construct
VAQKGCG

SEQ ID NO: 41576 - protein, 7 aa, synthetic construct
YYSGRLS

SEQ ID NO: 41577 - protein, 7 aa, synthetic construct
VSDFTGY

SEQ ID NO: 41578 - protein, 7 aa, synthetic construct
LWSGMGP

SEQ ID NO: 41579 - protein, 7 aa, synthetic construct
QMASQAW

SEQ ID NO: 41580 - protein, 7 aa, synthetic construct
FSRMNYN

SEQ ID NO: 41581 - protein, 7 aa, synthetic construct
SGYDRGW

SEQ ID NO: 41582 - protein, 7 aa, synthetic construct
FWGGIKE

SEQ ID NO: 41583 - protein, 7 aa, synthetic construct
TWDGMQA

SEQ ID NO: 41584 - protein, 7 aa, synthetic construct
APYDRGW

SEQ ID NO: 41585 - protein, 7 aa, synthetic construct
IDEFRSW

SEQ ID NO: 41586 - protein, 7 aa, synthetic construct
RENSVYW

SEQ ID NO: 41587 - protein, 7 aa, synthetic construct
RGDSSYW

SEQ ID NO: 41588 - protein, 7 aa, synthetic construct
MYAFSKE

SEQ ID NO: 41589 - protein, 7 aa, synthetic construct
WPFGMDA

SEQ ID NO: 41590 - protein, 7 aa, synthetic construct
KFDGTPS

SEQ ID NO: 41591 - protein, 7 aa, synthetic construct
RGEFTSY

SEQ ID NO: 41592 - protein, 7 aa, synthetic construct
TWEGTAA

SEQ ID NO: 41593 - protein, 7 aa, synthetic construct
FWTGIPD

SEQ ID NO: 41594 - protein, 7 aa, synthetic construct
KYDGTSA

SEQ ID NO: 41595 - protein, 7 aa, synthetic construct
CKMSCAE

SEQ ID NO: 41596 - protein, 7 aa, synthetic construct
CSKRPCG

SEQ ID NO: 41597 - protein, 7 aa, synthetic construct
RDETSFW

SEQ ID NO: 41598 - protein, 7 aa, synthetic construct
TVWGDPA

SEQ ID NO: 41599 - protein, 7 aa, synthetic construct
RGESVRW

SEQ ID NO: 41600 - protein, 7 aa, synthetic construct
FWSGQRD

SEQ ID NO: 41601 - protein, 7 aa, synthetic construct
DMGGYDW

SEQ ID NO: 41602 - protein, 7 aa, synthetic construct
VDDFKVF

SEQ ID NO: 41603 - protein, 7 aa, synthetic construct
IPERCPK

SEQ ID NO: 41604 - protein, 7 aa, synthetic construct
RMDSVSW

SEQ ID NO: 41605 - protein, 7 aa, synthetic construct
MLSSNTW

SEQ ID NO: 41606 - protein, 7 aa, synthetic construct
YSRDGCN

SEQ ID NO: 41607 - protein, 7 aa, synthetic construct
RMEDVYW

SEQ ID NO: 41608 - protein, 7 aa, synthetic construct
KWDGTSA

SEQ ID NO: 41609 - protein, 7 aa, synthetic construct
GCGTKYG

SEQ ID NO: 41610 - protein, 7 aa, synthetic construct
RTPTCYG

SEQ ID NO: 41611 - protein, 7 aa, synthetic construct
IPPLYQV

SEQ ID NO: 41612 - protein, 7 aa, synthetic construct
YVKWDSG

SEQ ID NO: 41613 - protein, 7 aa, synthetic construct
TWEGEGP

SEQ ID NO: 41614 - protein, 7 aa, synthetic construct
YFDGTPA

SEQ ID NO: 41615 - protein, 7 aa, synthetic construct
KDEFRAY

SEQ ID NO: 41616 - protein, 7 aa, synthetic construct
YSRFNIN

SEQ ID NO: 41617 - protein, 7 aa, synthetic construct
GSGTAKW

SEQ ID NO: 41618 - protein, 7 aa, synthetic construct
DMGSNTW

SEQ ID NO: 41619 - protein, 7 aa, synthetic construct
YNPGCKE

SEQ ID NO: 41620 - protein, 7 aa, synthetic construct
LFSGMGP

SEQ ID NO: 41621 - protein, 7 aa, synthetic construct
KVEHVRW

SEQ ID NO: 41622 - protein, 7 aa, synthetic construct
RDEFRPW

SEQ ID NO: 41623 - protein, 7 aa, synthetic construct
SMQDRIW

SEQ ID NO: 41624 - protein, 7 aa, synthetic construct
MRDGTIA

SEQ ID NO: 41625 - protein, 7 aa, synthetic construct
YEPGCKP

SEQ ID NO: 41626 - protein, 7 aa, synthetic construct
IPSKCPF

SEQ ID NO: 41627 - protein, 7 aa, synthetic construct
LWSGENA

SEQ ID NO: 41628 - protein, 7 aa, synthetic construct
TRWGDEA

SEQ ID NO: 41629 - protein, 7 aa, synthetic construct
MRDGSNA

SEQ ID NO: 41630 - protein, 7 aa, synthetic construct
RDDFHPF

SEQ ID NO: 41631 - protein, 7 aa, synthetic construct
FGPPTPD

SEQ ID NO: 41632 - protein, 7 aa, synthetic construct
LFDGTYA

SEQ ID NO: 41633 - protein, 7 aa, synthetic construct
FTPMCKA

SEQ ID NO: 41634 - protein, 7 aa, synthetic construct
YWSGQQA

SEQ ID NO: 41635 - protein, 7 aa, synthetic construct
YFAGVVS

SEQ ID NO: 41636 - protein, 7 aa, synthetic construct
KEDFLSW

SEQ ID NO: 41637 - protein, 7 aa, synthetic construct
RLDSANW

SEQ ID NO: 41638 - protein, 7 aa, synthetic construct
EMESTKW

SEQ ID NO: 41639 - protein, 7 aa, synthetic construct
YNAGREC

SEQ ID NO: 41640 - protein, 7 aa, synthetic construct
RDDFRTW

SEQ ID NO: 41641 - protein, 7 aa, synthetic construct
RDEFRGW

SEQ ID NO: 41642 - protein, 7 aa, synthetic construct
FDGASRW

SEQ ID NO: 41643 - protein, 7 aa, synthetic construct
TWDGTPA

SEQ ID NO: 41644 - protein, 7 aa, synthetic construct
KDDYSGY

SEQ ID NO: 41645 - protein, 7 aa, synthetic construct
KSDWTPY

SEQ ID NO: 41646 - protein, 7 aa, synthetic construct
KGDFSTW

SEQ ID NO: 41647 - protein, 7 aa, synthetic construct
RRDGTSA

SEQ ID NO: 41648 - protein, 7 aa, synthetic construct
WDPMCKA

SEQ ID NO: 41649 - protein, 7 aa, synthetic construct
RSEFTAF

SEQ ID NO: 41650 - protein, 7 aa, synthetic construct
REETSSW

SEQ ID NO: 41651 - protein, 7 aa, synthetic construct
LWDGTPR

SEQ ID NO: 41652 - protein, 7 aa, synthetic construct
IMATSTW

SEQ ID NO: 41653 - protein, 7 aa, synthetic construct
TYDGTAA

SEQ ID NO: 41654 - protein, 7 aa, synthetic construct
KDEYMVW

SEQ ID NO: 41655 - protein, 7 aa, synthetic construct
TWEGTPA

SEQ ID NO: 41656 - protein, 7 aa, synthetic construct
QDGYSRW

SEQ ID NO: 41657 - protein, 7 aa, synthetic construct
YFTNQIN

SEQ ID NO: 41658 - protein, 7 aa, synthetic construct
TWSGENA

SEQ ID NO: 41659 - protein, 7 aa, synthetic construct
KFDGTSA

SEQ ID NO: 41660 - protein, 7 aa, synthetic construct
LMDGTNA

SEQ ID NO: 41661 - protein, 7 aa, synthetic construct
LWDGTLR

SEQ ID NO: 41662 - protein, 7 aa, synthetic construct
KDGFSIY

SEQ ID NO: 41663 - protein, 7 aa, synthetic construct
GGESSMW

SEQ ID NO: 41664 - protein, 7 aa, synthetic construct
TKYGDPS

SEQ ID NO: 41665 - protein, 7 aa, synthetic construct
MRDGTTA

SEQ ID NO: 41666 - protein, 7 aa, synthetic construct
MRDGTDA

SEQ ID NO: 41667 - protein, 7 aa, synthetic construct
MRDGTRA

SEQ ID NO: 41668 - protein, 7 aa, synthetic construct
LFDGTIP

SEQ ID NO: 41669 - protein, 7 aa, synthetic construct
LRNGNPA

SEQ ID NO: 41670 - protein, 7 aa, synthetic construct
LRDGTRA

SEQ ID NO: 41671 - protein, 7 aa, synthetic construct
TRFGDPS

SEQ ID NO: 41672 - protein, 7 aa, synthetic construct
MWDGTHA

SEQ ID NO: 41673 - protein, 7 aa, synthetic construct
IPPLFEV

SEQ ID NO: 41674 - protein, 7 aa, synthetic construct
LCKPCLK

SEQ ID NO: 41675 - protein, 7 aa, synthetic construct
LCRPCSY

SEQ ID NO: 41676 - protein, 7 aa, synthetic construct
LFDGTVA

SEQ ID NO: 41677 - protein, 7 aa, synthetic construct
CKSQTCC

SEQ ID NO: 41678 - protein, 7 aa, synthetic construct
CALYLHE

SEQ ID NO: 41679 - protein, 7 aa, synthetic construct
YVKSQKL

SEQ ID NO: 41680 - protein, 7 aa, synthetic construct
CAPYEHE

SEQ ID NO: 41681 - protein, 7 aa, synthetic construct
REEYMPF

SEQ ID NO: 41682 - protein, 7 aa, synthetic construct
LCKPCLF

SEQ ID NO: 41683 - protein, 7 aa, synthetic construct
CAPDPRE

SEQ ID NO: 41684 - protein, 7 aa, synthetic construct
YHKLNPF

SEQ ID NO: 41685 - protein, 7 aa, synthetic construct
EDGSCKA

SEQ ID NO: 41686 - protein, 7 aa, synthetic construct
FSCVTGS

SEQ ID NO: 41687 - protein, 7 aa, synthetic construct
LCKPHLT

SEQ ID NO: 41688 - protein, 7 aa, synthetic construct
CAPQLHE

SEQ ID NO: 41689 - protein, 7 aa, synthetic construct
CKRGAMS

SEQ ID NO: 41690 - protein, 7 aa, synthetic construct
RTYDCIG

SEQ ID NO: 41691 - protein, 7 aa, synthetic construct
RNCEVGP

SEQ ID NO: 41692 - protein, 7 aa, synthetic construct
LCKGCLT

SEQ ID NO: 41693 - protein, 7 aa, synthetic construct
LCRPCSL

SEQ ID NO: 41694 - protein, 7 aa, synthetic construct
KFCNTGS

SEQ ID NO: 41695 - protein, 7 aa, synthetic construct
GRPNCKP

SEQ ID NO: 41696 - protein, 7 aa, synthetic construct
CKGSAEQ

SEQ ID NO: 41697 - protein, 7 aa, synthetic construct
KHDFTCA

SEQ ID NO: 41698 - protein, 7 aa, synthetic construct
LCVPCLT

SEQ ID NO: 41699 - protein, 7 aa, synthetic construct
RECTSPW

SEQ ID NO: 41700 - protein, 7 aa, synthetic construct
YWSGVVI

SEQ ID NO: 41701 - protein, 7 aa, synthetic construct
CRMAPPY

SEQ ID NO: 41702 - protein, 7 aa, synthetic construct
LCKPCLR

SEQ ID NO: 41703 - protein, 7 aa, synthetic construct
CGRSCCP

SEQ ID NO: 41704 - protein, 7 aa, synthetic construct
CKGSYEQ

SEQ ID NO: 41705 - protein, 7 aa, synthetic construct
FAKCNAN

SEQ ID NO: 41706 - protein, 7 aa, synthetic construct
RDEFTPW

SEQ ID NO: 41707 - protein, 7 aa, synthetic construct
FAKCNYN

SEQ ID NO: 41708 - protein, 7 aa, synthetic construct
CNPYLHE

SEQ ID NO: 41709 - protein, 7 aa, synthetic construct
TQIACDR

SEQ ID NO: 41710 - protein, 7 aa, synthetic construct
RCGIPTA

SEQ ID NO: 41711 - protein, 7 aa, synthetic construct
GGGPCCR

SEQ ID NO: 41712 - protein, 7 aa, synthetic construct
WTPHCKA

SEQ ID NO: 41713 - protein, 7 aa, synthetic construct
KDEYTMY

SEQ ID NO: 41714 - protein, 7 aa, synthetic construct
WTPMCKT

SEQ ID NO: 41715 - protein, 7 aa, synthetic construct
YFEGVRW

SEQ ID NO: 41716 - protein, 7 aa, synthetic construct
YEPGCSE

SEQ ID NO: 41717 - protein, 7 aa, synthetic construct
YFTGACD

SEQ ID NO: 41718 - protein, 7 aa, synthetic construct
IDEWLPF

SEQ ID NO: 41719 - protein, 7 aa, synthetic construct
YFTGMCE

SEQ ID NO: 41720 - protein, 7 aa, synthetic construct
CKPSPLF

SEQ ID NO: 41721 - protein, 7 aa, synthetic construct
CLPKCCE

SEQ ID NO: 41722 - protein, 7 aa, synthetic construct
YSRIGKN

SEQ ID NO: 41723 - protein, 7 aa, synthetic construct
YWTGCRE

SEQ ID NO: 41724 - protein, 7 aa, synthetic construct
CAPSLHE

SEQ ID NO: 41725 - protein, 7 aa, synthetic construct
CKPLCCE

SEQ ID NO: 41726 - protein, 7 aa, synthetic construct
MTGDSCL

SEQ ID NO: 41727 - protein, 7 aa, synthetic construct
YFTGKCV

SEQ ID NO: 41728 - protein, 7 aa, synthetic construct
WFSGVRI

SEQ ID NO: 41729 - protein, 7 aa, synthetic construct
CGSIRPT

SEQ ID NO: 41730 - protein, 7 aa, synthetic construct
CSGPPKE

SEQ ID NO: 41731 - protein, 7 aa, synthetic construct
LCKPCLY

SEQ ID NO: 41732 - protein, 7 aa, synthetic construct
GCRPCPG

SEQ ID NO: 41733 - protein, 7 aa, synthetic construct
CTSKTGW

SEQ ID NO: 41734 - protein, 7 aa, synthetic construct
QDGSCKA

SEQ ID NO: 41735 - protein, 7 aa, synthetic construct
YFTGRWD

SEQ ID NO: 41736 - protein, 7 aa, synthetic construct
CRTSECC

SEQ ID NO: 41737 - protein, 7 aa, synthetic construct
LCKPELT

SEQ ID NO: 41738 - protein, 7 aa, synthetic construct
YCRLSDN

SEQ ID NO: 41739 - protein, 7 aa, synthetic construct
CTSPTGH

SEQ ID NO: 41740 - protein, 7 aa, synthetic construct
GGSPCRP

SEQ ID NO: 41741 - protein, 7 aa, synthetic construct
GSGMSLW

SEQ ID NO: 41742 - protein, 7 aa, synthetic construct
YEQGCKE

SEQ ID NO: 41743 - protein, 7 aa, synthetic construct
CGGGRPW

SEQ ID NO: 41744 - protein, 7 aa, synthetic construct
CAPHLHE

SEQ ID NO: 41745 - protein, 7 aa, synthetic construct
RDEFVYY

SEQ ID NO: 41746 - protein, 7 aa, synthetic construct
RDEFVIY

SEQ ID NO: 41747 - protein, 7 aa, synthetic construct
GCRSGDI

SEQ ID NO: 41748 - protein, 7 aa, synthetic construct
YSKRNVN

SEQ ID NO: 41749 - protein, 7 aa, synthetic construct
CNDPMTA

SEQ ID NO: 41750 - protein, 7 aa, synthetic construct
KHDFTCS

SEQ ID NO: 41751 - protein, 7 aa, synthetic construct
SDWTDRC

SEQ ID NO: 41752 - protein, 7 aa, synthetic construct
CAPYGHE

SEQ ID NO: 41753 - protein, 7 aa, synthetic construct
GVETRCP

SEQ ID NO: 41754 - protein, 7 aa, synthetic construct
YSYIGPN

SEQ ID NO: 41755 - protein, 7 aa, synthetic construct
MTGTRCL

SEQ ID NO: 41756 - protein, 7 aa, synthetic construct
GCRHGQI

SEQ ID NO: 41757 - protein, 7 aa, synthetic construct
YEPGCFE

SEQ ID NO: 41758 - protein, 7 aa, synthetic construct
CKPLCPG

SEQ ID NO: 41759 - protein, 7 aa, synthetic construct
CAAYLHE

SEQ ID NO: 41760 - protein, 7 aa, synthetic construct
SKGSCEQ

SEQ ID NO: 41761 - protein, 7 aa, synthetic construct
VCRPCPI

SEQ ID NO: 41762 - protein, 7 aa, synthetic construct
CTDKTGH

SEQ ID NO: 41763 - protein, 7 aa, synthetic construct
CTSKMGH

SEQ ID NO: 41764 - protein, 7 aa, synthetic construct
YSRWNLN

SEQ ID NO: 41765 - protein, 7 aa, synthetic construct
KCDNTGS

SEQ ID NO: 41766 - protein, 7 aa, synthetic construct
EWEACPR

SEQ ID NO: 41767 - protein, 7 aa, synthetic construct
ICDKRDP

SEQ ID NO: 41768 - protein, 7 aa, synthetic construct
FHRKSPD

SEQ ID NO: 41769 - protein, 7 aa, synthetic construct
MMGTSCL

SEQ ID NO: 41770 - protein, 7 aa, synthetic construct
YFAGRPD

SEQ ID NO: 41771 - protein, 7 aa, synthetic construct
VSTHCDA

SEQ ID NO: 41772 - protein, 7 aa, synthetic construct
VPECRPN

SEQ ID NO: 41773 - protein, 7 aa, synthetic construct
GGPHCCG

SEQ ID NO: 41774 - protein, 7 aa, synthetic construct
RDDFVAF

SEQ ID NO: 41775 - protein, 7 aa, synthetic construct
FEGTNCR

SEQ ID NO: 41776 - protein, 7 aa, synthetic construct
LCRPASE

SEQ ID NO: 41777 - protein, 7 aa, synthetic construct
RGEFTAY

SEQ ID NO: 41778 - protein, 7 aa, synthetic construct
MTGTSCT

SEQ ID NO: 41779 - protein, 7 aa, synthetic construct
CEFGPMP

SEQ ID NO: 41780 - protein, 7 aa, synthetic construct
MTGNSCL

SEQ ID NO: 41781 - protein, 7 aa, synthetic construct
CKPNPSV

SEQ ID NO: 41782 - protein, 7 aa, synthetic construct
FTGTSCL

SEQ ID NO: 41783 - protein, 7 aa, synthetic construct
YFTGNIN

SEQ ID NO: 41784 - protein, 7 aa, synthetic construct
CYPLRPE

SEQ ID NO: 41785 - protein, 7 aa, synthetic construct
CDGSYKA

SEQ ID NO: 41786 - protein, 7 aa, synthetic construct
CTSKTNH

SEQ ID NO: 41787 - protein, 7 aa, synthetic construct
STGTSCL

SEQ ID NO: 41788 - protein, 7 aa, synthetic construct
KKGSCEQ

SEQ ID NO: 41789 - protein, 7 aa, synthetic construct
CGKDCCP

SEQ ID NO: 41790 - protein, 7 aa, synthetic construct
KCKENEP

SEQ ID NO: 41791 - protein, 7 aa, synthetic construct
RTYNMYP

SEQ ID NO: 41792 - protein, 7 aa, synthetic construct
CKLEYKE

SEQ ID NO: 41793 - protein, 7 aa, synthetic construct
VNEFLPY

SEQ ID NO: 41794 - protein, 7 aa, synthetic construct
VCSKKPA

SEQ ID NO: 41795 - protein, 7 aa, synthetic construct
DRGGCKP

SEQ ID NO: 41796 - protein, 7 aa, synthetic construct
DLMSAGW

SEQ ID NO: 41797 - protein, 7 aa, synthetic construct
DMTSSQW

SEQ ID NO: 41798 - protein, 7 aa, synthetic construct
MGYDRGW

SEQ ID NO: 41799 - protein, 7 aa, synthetic construct
CKEVKGW

SEQ ID NO: 41800 - protein, 7 aa, synthetic construct
IRGIHHQ

SEQ ID NO: 41801 - protein, 7 aa, synthetic construct
FEEHPSW

SEQ ID NO: 41802 - protein, 7 aa, synthetic construct
GGDWSTY

SEQ ID NO: 41803 - protein, 7 aa, synthetic construct
LGRPCSE

SEQ ID NO: 41804 - protein, 7 aa, synthetic construct
IHKYVGG

SEQ ID NO: 41805 - protein, 7 aa, synthetic construct
REEFTVW

SEQ ID NO: 41806 - protein, 7 aa, synthetic construct
GTEYVSY

SEQ ID NO: 41807 - protein, 7 aa, synthetic construct
CKPLMLE

SEQ ID NO: 41808 - protein, 7 aa, synthetic construct
GRDGVRW

SEQ ID NO: 41809 - protein, 7 aa, synthetic construct
RLESINW

SEQ ID NO: 41810 - protein, 7 aa, synthetic construct
IPRTCPP

SEQ ID NO: 41811 - protein, 7 aa, synthetic construct
MTGVSCL

SEQ ID NO: 41812 - protein, 7 aa, synthetic construct
DFYGTPS

SEQ ID NO: 41813 - protein, 7 aa, synthetic construct
RNDTVYW

SEQ ID NO: 41814 - protein, 7 aa, synthetic construct
TWDGLLA

SEQ ID NO: 41815 - protein, 7 aa, synthetic construct
LCKPCKT

SEQ ID NO: 41816 - protein, 7 aa, synthetic construct
CKDGCCS

SEQ ID NO: 41817 - protein, 7 aa, synthetic construct
CKARDCC

SEQ ID NO: 41818 - protein, 7 aa, synthetic construct
RSPTSYW

SEQ ID NO: 41819 - protein, 7 aa, synthetic construct
GGEFSTW

SEQ ID NO: 41820 - protein, 7 aa, synthetic construct
CFKKSTS

SEQ ID NO: 41821 - protein, 7 aa, synthetic construct
CKPGTWP

SEQ ID NO: 41822 - protein, 7 aa, synthetic construct
GCRHGMI

SEQ ID NO: 41823 - protein, 7 aa, synthetic construct
LCKPILT

SEQ ID NO: 41824 - protein, 7 aa, synthetic construct
YWPGCKE

SEQ ID NO: 41825 - protein, 7 aa, synthetic construct
CKPKCPV

SEQ ID NO: 41826 - protein, 7 aa, synthetic construct
CGPGKCC

SEQ ID NO: 41827 - protein, 7 aa, synthetic construct
CHDFTGS

SEQ ID NO: 41828 - protein, 7 aa, synthetic construct
TNPFNKH

SEQ ID NO: 41829 - protein, 7 aa, synthetic construct
RPDFCPF

SEQ ID NO: 41830 - protein, 7 aa, synthetic construct
DSSWEMW

SEQ ID NO: 41831 - protein, 7 aa, synthetic construct
GKGTKCG

SEQ ID NO: 41832 - protein, 7 aa, synthetic construct
YHRRGPD

SEQ ID NO: 41833 - protein, 7 aa, synthetic construct
GSTPCCR

SEQ ID NO: 41834 - protein, 7 aa, synthetic construct
CLRACRP

SEQ ID NO: 41835 - protein, 7 aa, synthetic construct
GGERSCW

SEQ ID NO: 41836 - protein, 7 aa, synthetic construct
SCQDRSW

SEQ ID NO: 41837 - protein, 7 aa, synthetic construct
GSPCTPW

SEQ ID NO: 41838 - protein, 7 aa, synthetic construct
CAPYLGE

SEQ ID NO: 41839 - protein, 7 aa, synthetic construct
RTPCLGP

SEQ ID NO: 41840 - protein, 7 aa, synthetic construct
YSKYNCN

SEQ ID NO: 41841 - protein, 7 aa, synthetic construct
CKDVCCA

SEQ ID NO: 41842 - protein, 7 aa, synthetic construct
QNEFLPW

SEQ ID NO: 41843 - protein, 7 aa, synthetic construct
WTPMCRA

SEQ ID NO: 41844 - protein, 7 aa, synthetic construct
CKPDHWD

SEQ ID NO: 41845 - protein, 7 aa, synthetic construct
NSAYGLR

SEQ ID NO: 41846 - protein, 7 aa, synthetic construct
AGCDRGW

SEQ ID NO: 41847 - protein, 7 aa, synthetic construct
CAPDYRD

SEQ ID NO: 41848 - protein, 7 aa, synthetic construct
WTPMCMA

SEQ ID NO: 41849 - protein, 7 aa, synthetic construct
FAKYNCN

SEQ ID NO: 41850 - protein, 7 aa, synthetic construct
LCLPCSE

SEQ ID NO: 41851 - protein, 7 aa, synthetic construct
CKPTCCE

SEQ ID NO: 41852 - protein, 7 aa, synthetic construct
CNKPMTG

SEQ ID NO: 41853 - protein, 7 aa, synthetic construct
CKPKKCD

SEQ ID NO: 41854 - protein, 7 aa, synthetic construct
FSKMFYN

SEQ ID NO: 41855 - protein, 7 aa, synthetic construct
KYDYTGF

SEQ ID NO: 41856 - protein, 7 aa, synthetic construct
IYASSTW

SEQ ID NO: 41857 - protein, 7 aa, synthetic construct
PCKATCV

SEQ ID NO: 41858 - protein, 7 aa, synthetic construct
CTMKTGH

SEQ ID NO: 41859 - protein, 7 aa, synthetic construct
LCKPGLT

SEQ ID NO: 41860 - protein, 7 aa, synthetic construct
IKKNCCA

SEQ ID NO: 41861 - protein, 7 aa, synthetic construct
GGEFVSW

SEQ ID NO: 41862 - protein, 7 aa, synthetic construct
MTQTSCL

SEQ ID NO: 41863 - protein, 7 aa, synthetic construct
FHRYGPD

SEQ ID NO: 41864 - protein, 7 aa, synthetic construct
YSRCNLN

SEQ ID NO: 41865 - protein, 7 aa, synthetic construct
KFDYSSY

SEQ ID NO: 41866 - protein, 7 aa, synthetic construct
TDKSAGC

SEQ ID NO: 41867 - protein, 7 aa, synthetic construct
VPEFCPY

SEQ ID NO: 41868 - protein, 7 aa, synthetic construct
GEPGCKE

SEQ ID NO: 41869 - protein, 7 aa, synthetic construct
YRFSEGR

SEQ ID NO: 41870 - protein, 7 aa, synthetic construct
CLKPTSC

SEQ ID NO: 41871 - protein, 7 aa, synthetic construct
CKDGKHC

SEQ ID NO: 41872 - protein, 7 aa, synthetic construct
YGPGCKE

SEQ ID NO: 41873 - protein, 7 aa, synthetic construct
KHEFTAF

SEQ ID NO: 41874 - protein, 7 aa, synthetic construct
LCKPLLT

SEQ ID NO: 41875 - protein, 7 aa, synthetic construct
YWTGMIV

SEQ ID NO: 41876 - protein, 7 aa, synthetic construct
CSEQFPC

SEQ ID NO: 41877 - protein, 7 aa, synthetic construct
YCRDGEN

SEQ ID NO: 41878 - protein, 7 aa, synthetic construct
CKPNTSW

SEQ ID NO: 41879 - protein, 7 aa, synthetic construct
FAKCNIN

SEQ ID NO: 41880 - protein, 7 aa, synthetic construct
CHRLPPS

SEQ ID NO: 41881 - protein, 7 aa, synthetic construct
WTPMCKP

SEQ ID NO: 41882 - protein, 7 aa, synthetic construct
MSMTTDN

SEQ ID NO: 41883 - protein, 7 aa, synthetic construct
WSAITCN

SEQ ID NO: 41884 - protein, 7 aa, synthetic construct
RSEFSAF

SEQ ID NO: 41885 - protein, 7 aa, synthetic construct
CKGSMEQ

SEQ ID NO: 41886 - protein, 7 aa, synthetic construct
CGMLCTS

SEQ ID NO: 41887 - protein, 7 aa, synthetic construct
YEPGCKW

SEQ ID NO: 41888 - protein, 7 aa, synthetic construct
KDDYVPF

SEQ ID NO: 41889 - protein, 7 aa, synthetic construct
RDEYTSF

SEQ ID NO: 41890 - protein, 7 aa, synthetic construct
CNKPMYA

SEQ ID NO: 41891 - protein, 7 aa, synthetic construct
VSEFNSY

SEQ ID NO: 41892 - protein, 7 aa, synthetic construct
STERVCR

SEQ ID NO: 41893 - protein, 7 aa, synthetic construct
FHRMNSN

SEQ ID NO: 41894 - protein, 7 aa, synthetic construct
CKEGCCT

SEQ ID NO: 41895 - protein, 7 aa, synthetic construct
RDEYSVW

SEQ ID NO: 41896 - protein, 7 aa, synthetic construct
PMESPSW

SEQ ID NO: 41897 - protein, 7 aa, synthetic construct
GMGTSLW

SEQ ID NO: 41898 - protein, 7 aa, synthetic construct
CKAGCCA

SEQ ID NO: 41899 - protein, 7 aa, synthetic construct
RTPTCVR

SEQ ID NO: 41900 - protein, 7 aa, synthetic construct
CKGSWEQ

SEQ ID NO: 41901 - protein, 7 aa, synthetic construct
YWSGIHL

SEQ ID NO: 41902 - protein, 7 aa, synthetic construct
CCIKKCP

SEQ ID NO: 41903 - protein, 7 aa, synthetic construct
CLGGCCS

SEQ ID NO: 41904 - protein, 7 aa, synthetic construct
YSRKNLN

SEQ ID NO: 41905 - protein, 7 aa, synthetic construct
CKPGMRL

SEQ ID NO: 41906 - protein, 7 aa, synthetic construct
CLKDVNS

SEQ ID NO: 41907 - protein, 7 aa, synthetic construct
CTATVAL

SEQ ID NO: 41908 - protein, 7 aa, synthetic construct
YVKSDRL

SEQ ID NO: 41909 - protein, 7 aa, synthetic construct
LHKLTNN

SEQ ID NO: 41910 - protein, 7 aa, synthetic construct
YVKVDPK

SEQ ID NO: 41911 - protein, 7 aa, synthetic construct
LSRVGIN

SEQ ID NO: 41912 - protein, 7 aa, synthetic construct
YVKSDSK

SEQ ID NO: 41913 - protein, 7 aa, synthetic construct
LHRLLPT

SEQ ID NO: 41914 - protein, 7 aa, synthetic construct
YSKLNAL

SEQ ID NO: 41915 - protein, 7 aa, synthetic construct
LSRLNVN

SEQ ID NO: 41916 - protein, 7 aa, synthetic construct
YVKSDKL

SEQ ID NO: 41917 - protein, 7 aa, synthetic construct
YVKSDTK

SEQ ID NO: 41918 - protein, 7 aa, synthetic construct
YVKSDNK

SEQ ID NO: 41919 - protein, 7 aa, synthetic construct
LSRLSNN

SEQ ID NO: 41920 - protein, 7 aa, synthetic construct
LARTGPN

SEQ ID NO: 41921 - protein, 7 aa, synthetic construct
YVKSDQR

SEQ ID NO: 41922 - protein, 7 aa, synthetic construct
YLKSDNK

SEQ ID NO: 41923 - protein, 7 aa, synthetic construct
LSRVGNN

SEQ ID NO: 41924 - protein, 7 aa, synthetic construct
LSRTGPN

SEQ ID NO: 41925 - protein, 7 aa, synthetic construct
LSRIGNN

SEQ ID NO: 41926 - protein, 7 aa, synthetic construct
LHKNLMN

SEQ ID NO: 41927 - protein, 7 aa, synthetic construct
LTRISTN

SEQ ID NO: 41928 - protein, 7 aa, synthetic construct
LSRVGAN

SEQ ID NO: 41929 - protein, 7 aa, synthetic construct
LSRTAYN

SEQ ID NO: 41930 - protein, 7 aa, synthetic construct
YHKLNTN

SEQ ID NO: 41931 - protein, 7 aa, synthetic construct
YHKLNQN

SEQ ID NO: 41932 - protein, 7 aa, synthetic construct
YLKSDTK

SEQ ID NO: 41933 - protein, 7 aa, synthetic construct
YVKSDKQ

SEQ ID NO: 41934 - protein, 7 aa, synthetic construct
IHKLTIN

SEQ ID NO: 41935 - protein, 7 aa, synthetic construct
LHRLAVD

SEQ ID NO: 41936 - protein, 7 aa, synthetic construct
YIKSDTK

SEQ ID NO: 41937 - protein, 7 aa, synthetic construct
LHKAGIN

SEQ ID NO: 41938 - protein, 7 aa, synthetic construct
YIKSDIK

SEQ ID NO: 41939 - protein, 7 aa, synthetic construct
LHKASLN

SEQ ID NO: 41940 - protein, 7 aa, synthetic construct
YVKSDKN

SEQ ID NO: 41941 - protein, 7 aa, synthetic construct
LHKTGPN

SEQ ID NO: 41942 - protein, 7 aa, synthetic construct
LSRLNSN

SEQ ID NO: 41943 - protein, 7 aa, synthetic construct
LHKSLTN

SEQ ID NO: 41944 - protein, 7 aa, synthetic construct
YIKNDSK

SEQ ID NO: 41945 - protein, 7 aa, synthetic construct
LARTGFN

SEQ ID NO: 41946 - protein, 7 aa, synthetic construct
LSRVSTN

SEQ ID NO: 41947 - protein, 7 aa, synthetic construct
LARTATN

SEQ ID NO: 41948 - protein, 7 aa, synthetic construct
LARTGNN

SEQ ID NO: 41949 - protein, 7 aa, synthetic construct
YSKLGNN

SEQ ID NO: 41950 - protein, 7 aa, synthetic construct
HSKLNMN

SEQ ID NO: 41951 - protein, 7 aa, synthetic construct
LSKLSNN

SEQ ID NO: 41952 - protein, 7 aa, synthetic construct
LSRVGVN

SEQ ID NO: 41953 - protein, 7 aa, synthetic construct
LHKMGLN

SEQ ID NO: 41954 - protein, 7 aa, synthetic construct
YLKSDQR

SEQ ID NO: 41955 - protein, 7 aa, synthetic construct
LHKAGLN

SEQ ID NO: 41956 - protein, 7 aa, synthetic construct
LARTAAN

SEQ ID NO: 41957 - protein, 7 aa, synthetic construct
FVKSDNK

SEQ ID NO: 41958 - protein, 7 aa, synthetic construct
YVKNDLK

SEQ ID NO: 41959 - protein, 7 aa, synthetic construct
LHKLLHD

SEQ ID NO: 41960 - protein, 7 aa, synthetic construct
LHRLAND

SEQ ID NO: 41961 - protein, 7 aa, synthetic construct
LHKQGLN

SEQ ID NO: 41962 - protein, 7 aa, synthetic construct
LHKQGIN

SEQ ID NO: 41963 - protein, 7 aa, synthetic construct
LSRVSAN

SEQ ID NO: 41964 - protein, 7 aa, synthetic construct
LARTGVN

SEQ ID NO: 41965 - protein, 7 aa, synthetic construct
YTKSDTK

SEQ ID NO: 41966 - protein, 7 aa, synthetic construct
LHRLATD

SEQ ID NO: 41967 - protein, 7 aa, synthetic construct
LHKASIN

SEQ ID NO: 41968 - protein, 7 aa, synthetic construct
LHKASVN

SEQ ID NO: 41969 - protein, 7 aa, synthetic construct
LHRLTHD

SEQ ID NO: 41970 - protein, 7 aa, synthetic construct
LHRLTVD

SEQ ID NO: 41971 - protein, 7 aa, synthetic construct
LHKNLTN

SEQ ID NO: 41972 - protein, 7 aa, synthetic construct
LHKMSTN

SEQ ID NO: 41973 - protein, 7 aa, synthetic construct
LSKLNNN

SEQ ID NO: 41974 - protein, 7 aa, synthetic construct
YVKSDRQ

SEQ ID NO: 41975 - protein, 7 aa, synthetic construct
LHKMGNN

SEQ ID NO: 41976 - protein, 7 aa, synthetic construct
LHKAGVN

SEQ ID NO: 41977 - protein, 7 aa, synthetic construct
LSRLSEN

SEQ ID NO: 41978 - protein, 7 aa, synthetic construct
LTKLHSN

SEQ ID NO: 41979 - protein, 7 aa, synthetic construct
VASTNGR

SEQ ID NO: 41980 - protein, 7 aa, synthetic construct
VTSTNGR

SEQ ID NO: 41981 - protein, 7 aa, synthetic construct
LHRLNEN

SEQ ID NO: 41982 - protein, 7 aa, synthetic construct
LHKAGAN

SEQ ID NO: 41983 - protein, 7 aa, synthetic construct
LHKLGPD

SEQ ID NO: 41984 - protein, 7 aa, synthetic construct
LSRTAVN

SEQ ID NO: 41985 - protein, 7 aa, synthetic construct
LHKLSLD

SEQ ID NO: 41986 - protein, 7 aa, synthetic construct
LSKLSMN

SEQ ID NO: 41987 - protein, 7 aa, synthetic construct
LHKAGMN

SEQ ID NO: 41988 - protein, 7 aa, synthetic construct
LHKSLHN

SEQ ID NO: 41989 - protein, 7 aa, synthetic construct
LHKQGYN

SEQ ID NO: 41990 - protein, 7 aa, synthetic construct
YIKSDRN

SEQ ID NO: 41991 - protein, 7 aa, synthetic construct
LSRAGGG

SEQ ID NO: 41992 - protein, 7 aa, synthetic construct
LSRLSDN

SEQ ID NO: 41993 - protein, 7 aa, synthetic construct
LHRLQDT

SEQ ID NO: 41994 - protein, 7 aa, synthetic construct
YVKSDMF

SEQ ID NO: 41995 - protein, 7 aa, synthetic construct
LHRLGID

SEQ ID NO: 41996 - protein, 7 aa, synthetic construct
YSKLQSN

SEQ ID NO: 41997 - protein, 7 aa, synthetic construct
LSRVGSN

SEQ ID NO: 41998 - protein, 7 aa, synthetic construct
YVKSQVN

SEQ ID NO: 41999 - protein, 7 aa, synthetic construct
LHKLGLD

SEQ ID NO: 42000 - protein, 7 aa, synthetic construct
LSRLSLD

SEQ ID NO: 42001 - protein, 7 aa, synthetic construct
LHKSGVN

SEQ ID NO: 42002 - protein, 7 aa, synthetic construct
LHRLGTD

SEQ ID NO: 42003 - protein, 7 aa, synthetic construct
LHRLSTD

SEQ ID NO: 42004 - protein, 7 aa, synthetic construct
LHKQSVN

SEQ ID NO: 42005 - protein, 7 aa, synthetic construct
LHKLGYD

SEQ ID NO: 42006 - protein, 7 aa, synthetic construct
LHRLGSD

SEQ ID NO: 42007 - protein, 7 aa, synthetic construct
LHKQSLN

SEQ ID NO: 42008 - protein, 7 aa, synthetic construct
LSRVGTN

SEQ ID NO: 42009 - protein, 7 aa, synthetic construct
LHKAGNN

SEQ ID NO: 42010 - protein, 7 aa, synthetic construct
LHKLGVD

SEQ ID NO: 42011 - protein, 7 aa, synthetic construct
YVKSQNH

SEQ ID NO: 42012 - protein, 7 aa, synthetic construct
YHKNSPN

SEQ ID NO: 42013 - protein, 7 aa, synthetic construct
YHKTGPN

SEQ ID NO: 42014 - protein, 7 aa, synthetic construct
LHKLTDN

SEQ ID NO: 42015 - protein, 7 aa, synthetic construct
YHKAGMN

SEQ ID NO: 42016 - protein, 7 aa, synthetic construct
LHRLSDD

SEQ ID NO: 42017 - protein, 7 aa, synthetic construct
LHKSLSN

SEQ ID NO: 42018 - protein, 7 aa, synthetic construct
LSRTGLN

SEQ ID NO: 42019 - protein, 7 aa, synthetic construct
LHKLSDN

SEQ ID NO: 42020 - protein, 7 aa, synthetic construct
LHKQGVN

SEQ ID NO: 42021 - protein, 7 aa, synthetic construct
LHKMTTN

SEQ ID NO: 42022 - protein, 7 aa, synthetic construct
YHKLGAG

SEQ ID NO: 42023 - protein, 7 aa, synthetic construct
YHKSSPN

SEQ ID NO: 42024 - protein, 7 aa, synthetic construct
YVKTDTR

SEQ ID NO: 42025 - protein, 7 aa, synthetic construct
LHKASAN

SEQ ID NO: 42026 - protein, 7 aa, synthetic construct
LHKSTPN

SEQ ID NO: 42027 - protein, 7 aa, synthetic construct
LHRALPD

SEQ ID NO: 42028 - protein, 7 aa, synthetic construct
YSALNIN

SEQ ID NO: 42029 - protein, 7 aa, synthetic construct
WSKAGGG

SEQ ID NO: 42030 - protein, 7 aa, synthetic construct
YTKSDTR

SEQ ID NO: 42031 - protein, 7 aa, synthetic construct
YARNGNN

SEQ ID NO: 42032 - protein, 7 aa, synthetic construct
LHKASTN

SEQ ID NO: 42033 - protein, 7 aa, synthetic construct
VNSTNGR

SEQ ID NO: 42034 - protein, 7 aa, synthetic construct
IHRLTDN

SEQ ID NO: 42035 - protein, 7 aa, synthetic construct
LSRAGPN

SEQ ID NO: 42036 - protein, 7 aa, synthetic construct
YTKSDNK

SEQ ID NO: 42037 - protein, 7 aa, synthetic construct
HHKLQEN

SEQ ID NO: 42038 - protein, 7 aa, synthetic construct
LSRVSSN

SEQ ID NO: 42039 - protein, 7 aa, synthetic construct
YSKIGPD

SEQ ID NO: 42040 - protein, 7 aa, synthetic construct
LSRTSAN

SEQ ID NO: 42041 - protein, 7 aa, synthetic construct
LARTGTN

SEQ ID NO: 42042 - protein, 7 aa, synthetic construct
KDEMTHW

SEQ ID NO: 42043 - protein, 7 aa, synthetic construct
LHKNGVN

SEQ ID NO: 42044 - protein, 7 aa, synthetic construct
YSKLNEN

SEQ ID NO: 42045 - protein, 7 aa, synthetic construct
LHRSLEN

SEQ ID NO: 42046 - protein, 7 aa, synthetic construct
LHKNGLN

SEQ ID NO: 42047 - protein, 7 aa, synthetic construct
LHKSGIN

SEQ ID NO: 42048 - protein, 7 aa, synthetic construct
LHVRTVN

SEQ ID NO: 42049 - protein, 7 aa, synthetic construct
LHSLLPN

SEQ ID NO: 42050 - protein, 7 aa, synthetic construct
ISSTNGR

SEQ ID NO: 42051 - protein, 7 aa, synthetic construct
LHRLQTD

SEQ ID NO: 42052 - protein, 7 aa, synthetic construct
YHKSQPN

SEQ ID NO: 42053 - protein, 7 aa, synthetic construct
YSRLHDN

SEQ ID NO: 42054 - protein, 7 aa, synthetic construct
LSRTANN

SEQ ID NO: 42055 - protein, 7 aa, synthetic construct
YHSLGPN

SEQ ID NO: 42056 - protein, 7 aa, synthetic construct
LHKAGTN

SEQ ID NO: 42057 - protein, 7 aa, synthetic construct
LHKQGNN

SEQ ID NO: 42058 - protein, 7 aa, synthetic construct
LSKLSEN

SEQ ID NO: 42059 - protein, 7 aa, synthetic construct
LSRISSN

SEQ ID NO: 42060 - protein, 7 aa, synthetic construct
LSRTSQN

SEQ ID NO: 42061 - protein, 7 aa, synthetic construct
LHKNSIN

SEQ ID NO: 42062 - protein, 7 aa, synthetic construct
LHKQGTN

SEQ ID NO: 42063 - protein, 7 aa, synthetic construct
LSRVGEN

SEQ ID NO: 42064 - protein, 7 aa, synthetic construct
YVKSDPR

SEQ ID NO: 42065 - protein, 7 aa, synthetic construct
LHKASNN

SEQ ID NO: 42066 - protein, 7 aa, synthetic construct
LHKLSAD

SEQ ID NO: 42067 - protein, 7 aa, synthetic construct
YHKLSDN

SEQ ID NO: 42068 - protein, 7 aa, synthetic construct
LARSGLN

SEQ ID NO: 42069 - protein, 7 aa, synthetic construct
LHKYGEN

SEQ ID NO: 42070 - protein, 7 aa, synthetic construct
YVKSDQN

SEQ ID NO: 42071 - protein, 7 aa, synthetic construct
LHRLQDS

SEQ ID NO: 42072 - protein, 7 aa, synthetic construct
YVRSDNN

SEQ ID NO: 42073 - protein, 7 aa, synthetic construct
YLKSQNS

SEQ ID NO: 42074 - protein, 7 aa, synthetic construct
YSRVSPN

SEQ ID NO: 42075 - protein, 7 aa, synthetic construct
YVKNDPK

SEQ ID NO: 42076 - protein, 7 aa, synthetic construct
LSRTSSN

SEQ ID NO: 42077 - protein, 7 aa, synthetic construct
LHKQSMN

SEQ ID NO: 42078 - protein, 7 aa, synthetic construct
YVKTDTK

SEQ ID NO: 42079 - protein, 7 aa, synthetic construct
YSRLNAP

SEQ ID NO: 42080 - protein, 7 aa, synthetic construct
YARTSAN

SEQ ID NO: 42081 - protein, 7 aa, synthetic construct
LSRTGVN

SEQ ID NO: 42082 - protein, 7 aa, synthetic construct
LARAGPN

SEQ ID NO: 42083 - protein, 7 aa, synthetic construct
LHKSSIN

SEQ ID NO: 42084 - protein, 7 aa, synthetic construct
YSRAGGG

SEQ ID NO: 42085 - protein, 7 aa, synthetic construct
YVKSDNN

SEQ ID NO: 42086 - protein, 7 aa, synthetic construct
LSRTGNN

SEQ ID NO: 42087 - protein, 7 aa, synthetic construct
LSRTGHN

SEQ ID NO: 42088 - protein, 7 aa, synthetic construct
YVKSDTT

SEQ ID NO: 42089 - protein, 7 aa, synthetic construct
LSRLNEN

SEQ ID NO: 42090 - protein, 7 aa, synthetic construct
LSRTATN

SEQ ID NO: 42091 - protein, 7 aa, synthetic construct
YIKTDTK

SEQ ID NO: 42092 - protein, 7 aa, synthetic construct
YVKSDNT

SEQ ID NO: 42093 - protein, 7 aa, synthetic construct
LHARTMN

SEQ ID NO: 42094 - protein, 7 aa, synthetic construct
LHKSGNN

SEQ ID NO: 42095 - protein, 7 aa, synthetic construct
RLLDAFP

SEQ ID NO: 42096 - protein, 7 aa, synthetic construct
WVKSDLR

SEQ ID NO: 42097 - protein, 7 aa, synthetic construct
LHRAGTN

SEQ ID NO: 42098 - protein, 7 aa, synthetic construct
LARTSIN

SEQ ID NO: 42099 - protein, 7 aa, synthetic construct
LHKSQVN

SEQ ID NO: 42100 - protein, 7 aa, synthetic construct
LHRSLAN

SEQ ID NO: 42101 - protein, 7 aa, synthetic construct
LARTGSN

SEQ ID NO: 42102 - protein, 7 aa, synthetic construct
LHRQLEN

SEQ ID NO: 42103 - protein, 7 aa, synthetic construct
KNEFSTY

SEQ ID NO: 42104 - protein, 7 aa, synthetic construct
RLIDAYP

SEQ ID NO: 42105 - protein, 7 aa, synthetic construct
YVKSDTN

SEQ ID NO: 42106 - protein, 7 aa, synthetic construct
IATKGWD

SEQ ID NO: 42107 - protein, 7 aa, synthetic construct
LAKSAPN

SEQ ID NO: 42108 - protein, 7 aa, synthetic construct
LSKVSFN

SEQ ID NO: 42109 - protein, 7 aa, synthetic construct
LARTSLN

SEQ ID NO: 42110 - protein, 7 aa, synthetic construct
YARTSMN

SEQ ID NO: 42111 - protein, 7 aa, synthetic construct
YVKSDHT

SEQ ID NO: 42112 - protein, 7 aa, synthetic construct
YVKTDNK

SEQ ID NO: 42113 - protein, 7 aa, synthetic construct
YIKSDNN

SEQ ID NO: 42114 - protein, 7 aa, synthetic construct
LHKSSLN

SEQ ID NO: 42115 - protein, 7 aa, synthetic construct
YSRLNTD

SEQ ID NO: 42116 - protein, 7 aa, synthetic construct
LARTGQN

SEQ ID NO: 42117 - protein, 7 aa, synthetic construct
YTKLHTN

SEQ ID NO: 42118 - protein, 7 aa, synthetic construct
LHRTGQN

SEQ ID NO: 42119 - protein, 7 aa, synthetic construct
LSRAGAN

SEQ ID NO: 42120 - protein, 7 aa, synthetic construct
RARTDDH

SEQ ID NO: 42121 - protein, 7 aa, synthetic construct
IHRLLND

SEQ ID NO: 42122 - protein, 7 aa, synthetic construct
YSKLSNN

SEQ ID NO: 42123 - protein, 7 aa, synthetic construct
YLKSQDN

SEQ ID NO: 42124 - protein, 7 aa, synthetic construct
LHAKTVN

SEQ ID NO: 42125 - protein, 7 aa, synthetic construct
YARNGPD

SEQ ID NO: 42126 - protein, 7 aa, synthetic construct
YHKAQSN

SEQ ID NO: 42127 - protein, 7 aa, synthetic construct
YHKAGSN

SEQ ID NO: 42128 - protein, 7 aa, synthetic construct
YHKAGIN

SEQ ID NO: 42129 - protein, 7 aa, synthetic construct
YSRVGDN

SEQ ID NO: 42130 - protein, 7 aa, synthetic construct
YARTGEN

SEQ ID NO: 42131 - protein, 7 aa, synthetic construct
WVKSDTR

SEQ ID NO: 42132 - protein, 7 aa, synthetic construct
YVKSDDH

SEQ ID NO: 42133 - protein, 7 aa, synthetic construct
YIKSDTN

SEQ ID NO: 42134 - protein, 7 aa, synthetic construct
YVKSDAN

SEQ ID NO: 42135 - protein, 7 aa, synthetic construct
PGATSGW

SEQ ID NO: 42136 - protein, 7 aa, synthetic construct
LHKSSVN

SEQ ID NO: 42137 - protein, 7 aa, synthetic construct
LHKSGLN

SEQ ID NO: 42138 - protein, 7 aa, synthetic construct
LHKAAAN

SEQ ID NO: 42139 - protein, 7 aa, synthetic construct
LHRQGYD

SEQ ID NO: 42140 - protein, 7 aa, synthetic construct
RTEYTYP

SEQ ID NO: 42141 - protein, 7 aa, synthetic construct
YHRLSDS

SEQ ID NO: 42142 - protein, 7 aa, synthetic construct
YSRLNAD

SEQ ID NO: 42143 - protein, 7 aa, synthetic construct
LSRIGGG

SEQ ID NO: 42144 - protein, 7 aa, synthetic construct
LRTGEGP

SEQ ID NO: 42145 - protein, 7 aa, synthetic construct
LSKLNYD

SEQ ID NO: 42146 - protein, 7 aa, synthetic construct
YSRISAN

SEQ ID NO: 42147 - protein, 7 aa, synthetic construct
LHKAATN

SEQ ID NO: 42148 - protein, 7 aa, synthetic construct
YSRVGAG

SEQ ID NO: 42149 - protein, 7 aa, synthetic construct
LHKNGAN

SEQ ID NO: 42150 - protein, 7 aa, synthetic construct
YHKSGLN

SEQ ID NO: 42151 - protein, 7 aa, synthetic construct
LHKQSTN

SEQ ID NO: 42152 - protein, 7 aa, synthetic construct
LHRNGIN

SEQ ID NO: 42153 - protein, 7 aa, synthetic construct
LHKSGTN

SEQ ID NO: 42154 - protein, 7 aa, synthetic construct
LHRAGEN

SEQ ID NO: 42155 - protein, 7 aa, synthetic construct
RTAEVYP

SEQ ID NO: 42156 - protein, 7 aa, synthetic construct
LHRQGTN

SEQ ID NO: 42157 - protein, 7 aa, synthetic construct
VSDYVTF

SEQ ID NO: 42158 - protein, 7 aa, synthetic construct
LHKAQTN

SEQ ID NO: 42159 - protein, 7 aa, synthetic construct
LHKQGSN

SEQ ID NO: 42160 - protein, 7 aa, synthetic construct
VESTNGK

SEQ ID NO: 42161 - protein, 7 aa, synthetic construct
LHKALPI

SEQ ID NO: 42162 - protein, 7 aa, synthetic construct
YARTGDN

SEQ ID NO: 42163 - protein, 7 aa, synthetic construct
LHRDGPN

SEQ ID NO: 42164 - protein, 7 aa, synthetic construct
VYSTNGR

SEQ ID NO: 42165 - protein, 7 aa, synthetic construct
TADNIYF

SEQ ID NO: 42166 - protein, 7 aa, synthetic construct
LHRALHD

SEQ ID NO: 42167 - protein, 7 aa, synthetic construct
YHKMSTN

SEQ ID NO: 42168 - protein, 7 aa, synthetic construct
YSRLNSD

SEQ ID NO: 42169 - protein, 7 aa, synthetic construct
YSRTQTN

SEQ ID NO: 42170 - protein, 7 aa, synthetic construct
HHKLSNN

SEQ ID NO: 42171 - protein, 7 aa, synthetic construct
LHKSSTN

SEQ ID NO: 42172 - protein, 7 aa, synthetic construct
VGSTNGR

SEQ ID NO: 42173 - protein, 7 aa, synthetic construct
YHKLTEN

SEQ ID NO: 42174 - protein, 7 aa, synthetic construct
LHKSTAN

SEQ ID NO: 42175 - protein, 7 aa, synthetic construct
LHKSSAN

SEQ ID NO: 42176 - protein, 7 aa, synthetic construct
LARSGMN

SEQ ID NO: 42177 - protein, 7 aa, synthetic construct
YVKTDNR

SEQ ID NO: 42178 - protein, 7 aa, synthetic construct
LHRNGVN

SEQ ID NO: 42179 - protein, 7 aa, synthetic construct
SSDFVSF

SEQ ID NO: 42180 - protein, 7 aa, synthetic construct
LHKNGMN

SEQ ID NO: 42181 - protein, 7 aa, synthetic construct
YTKSDMR

SEQ ID NO: 42182 - protein, 7 aa, synthetic construct
LHKNGTN

SEQ ID NO: 42183 - protein, 7 aa, synthetic construct
TDEFTSY

SEQ ID NO: 42184 - protein, 7 aa, synthetic construct
YHRNGPD

SEQ ID NO: 42185 - protein, 7 aa, synthetic construct
YVKSNNS

SEQ ID NO: 42186 - protein, 7 aa, synthetic construct
LHKSSYN

SEQ ID NO: 42187 - protein, 7 aa, synthetic construct
LHARSVN

SEQ ID NO: 42188 - protein, 7 aa, synthetic construct
YSKLNTD

SEQ ID NO: 42189 - protein, 7 aa, synthetic construct
LSRTASN

SEQ ID NO: 42190 - protein, 7 aa, synthetic construct
YHKNGAN

SEQ ID NO: 42191 - protein, 7 aa, synthetic construct
LHRTSVN

SEQ ID NO: 42192 - protein, 7 aa, synthetic construct
LHKAGSN

SEQ ID NO: 42193 - protein, 7 aa, synthetic construct
LHRSGVN

SEQ ID NO: 42194 - protein, 7 aa, synthetic construct
LHRASTN

SEQ ID NO: 42195 - protein, 7 aa, synthetic construct
YSKLNLD

SEQ ID NO: 42196 - protein, 7 aa, synthetic construct
LSRTGTN

SEQ ID NO: 42197 - protein, 7 aa, synthetic construct
VESTNGM

SEQ ID NO: 42198 - protein, 7 aa, synthetic construct
YVHSDLK

SEQ ID NO: 42199 - protein, 7 aa, synthetic construct
YALEGRD

SEQ ID NO: 42200 - protein, 7 aa, synthetic construct
LHREGPN

SEQ ID NO: 42201 - protein, 7 aa, synthetic construct
YHKSGMN

SEQ ID NO: 42202 - protein, 7 aa, synthetic construct
YHRTGPD

SEQ ID NO: 42203 - protein, 7 aa, synthetic construct
LHRHGDN

SEQ ID NO: 42204 - protein, 7 aa, synthetic construct
LHKLGTD

SEQ ID NO: 42205 - protein, 7 aa, synthetic construct
LHKLTLD

SEQ ID NO: 42206 - protein, 7 aa, synthetic construct
LRSGEGP

SEQ ID NO: 42207 - protein, 7 aa, synthetic construct
LARSGTN

SEQ ID NO: 42208 - protein, 7 aa, synthetic construct
LMQDAYP

SEQ ID NO: 42209 - protein, 7 aa, synthetic construct
LSRISDN

SEQ ID NO: 42210 - protein, 7 aa, synthetic construct
RTQDSYP

SEQ ID NO: 42211 - protein, 7 aa, synthetic construct
LSRLNTD

SEQ ID NO: 42212 - protein, 7 aa, synthetic construct
LHKQTLN

SEQ ID NO: 42213 - protein, 7 aa, synthetic construct
YHKAGVN

SEQ ID NO: 42214 - protein, 7 aa, synthetic construct
YHKNGPG

SEQ ID NO: 42215 - protein, 7 aa, synthetic construct
YVKSQST

SEQ ID NO: 42216 - protein, 7 aa, synthetic construct
FHKLSEN

SEQ ID NO: 42217 - protein, 7 aa, synthetic construct
ACVIKPS

SEQ ID NO: 42218 - protein, 7 aa, synthetic construct
RNDECCF

SEQ ID NO: 42219 - protein, 7 aa, synthetic construct
YVKSDAM

SEQ ID NO: 42220 - protein, 7 aa, synthetic construct
LHKASSN

SEQ ID NO: 42221 - protein, 7 aa, synthetic construct
RTNEVYP

SEQ ID NO: 42222 - protein, 7 aa, synthetic construct
YIKHDTN

SEQ ID NO: 42223 - protein, 7 aa, synthetic construct
KSDFVAY

SEQ ID NO: 42224 - protein, 7 aa, synthetic construct
YHKSTPN

SEQ ID NO: 42225 - protein, 7 aa, synthetic construct
LHKHGDN

SEQ ID NO: 42226 - protein, 7 aa, synthetic construct
LARGSFN

SEQ ID NO: 42227 - protein, 7 aa, synthetic construct
MHKLSSN

SEQ ID NO: 42228 - protein, 7 aa, synthetic construct
VNSTHGR

SEQ ID NO: 42229 - protein, 7 aa, synthetic construct
HGNGNFV

SEQ ID NO: 42230 - protein, 7 aa, synthetic construct
YVKSDHK

SEQ ID NO: 42231 - protein, 7 aa, synthetic construct
LHRNLDN

SEQ ID NO: 42232 - protein, 7 aa, synthetic construct
YSSTNGM

SEQ ID NO: 42233 - protein, 7 aa, synthetic construct
YSRVGTD

SEQ ID NO: 42234 - protein, 7 aa, synthetic construct
GDEFKIF

SEQ ID NO: 42235 - protein, 7 aa, synthetic construct
RNQDVFP

SEQ ID NO: 42236 - protein, 7 aa, synthetic construct
LSRAATN

SEQ ID NO: 42237 - protein, 7 aa, synthetic construct
LSKTSFN

SEQ ID NO: 42238 - protein, 7 aa, synthetic construct
LSKLHSN

SEQ ID NO: 42239 - protein, 7 aa, synthetic construct
LARTSTN

SEQ ID NO: 42240 - protein, 7 aa, synthetic construct
LHKSTVN

SEQ ID NO: 42241 - protein, 7 aa, synthetic construct
TSENTYF

SEQ ID NO: 42242 - protein, 7 aa, synthetic construct
LHKMASN

SEQ ID NO: 42243 - protein, 7 aa, synthetic construct
LHKSLGN

SEQ ID NO: 42244 - protein, 7 aa, synthetic construct
LHRSSEN

SEQ ID NO: 42245 - protein, 7 aa, synthetic construct
LHKMGEN

SEQ ID NO: 42246 - protein, 7 aa, synthetic construct
YVKSQIT

SEQ ID NO: 42247 - protein, 7 aa, synthetic construct
TDEWTGF

SEQ ID NO: 42248 - protein, 7 aa, synthetic construct
LHRQTNN

SEQ ID NO: 42249 - protein, 7 aa, synthetic construct
TKWGDNP

SEQ ID NO: 42250 - protein, 7 aa, synthetic construct
LHRTTAN

SEQ ID NO: 42251 - protein, 7 aa, synthetic construct
YHRAGEN

SEQ ID NO: 42252 - protein, 7 aa, synthetic construct
YVRNGPN

SEQ ID NO: 42253 - protein, 7 aa, synthetic construct
LHAKSTN

SEQ ID NO: 42254 - protein, 7 aa, synthetic construct
LHKNSNN

SEQ ID NO: 42255 - protein, 7 aa, synthetic construct
LHRTTTN

SEQ ID NO: 42256 - protein, 7 aa, synthetic construct
IHDRMCS

SEQ ID NO: 42257 - protein, 7 aa, synthetic construct
NALIGFD

SEQ ID NO: 42258 - protein, 7 aa, synthetic construct
YLKSDNN

SEQ ID NO: 42259 - protein, 7 aa, synthetic construct
RTDQVYP

SEQ ID NO: 42260 - protein, 7 aa, synthetic construct
RDDTVFP

SEQ ID NO: 42261 - protein, 7 aa, synthetic construct
YVKSDPN

SEQ ID NO: 42262 - protein, 7 aa, synthetic construct
LARTSNN

SEQ ID NO: 42263 - protein, 7 aa, synthetic construct
LSKSSFN

SEQ ID NO: 42264 - protein, 7 aa, synthetic construct
YLKSDTS

SEQ ID NO: 42265 - protein, 7 aa, synthetic construct
YARSSTN

SEQ ID NO: 42266 - protein, 7 aa, synthetic construct
LHKSTIN

SEQ ID NO: 42267 - protein, 7 aa, synthetic construct
KSEYYAH

SEQ ID NO: 42268 - protein, 7 aa, synthetic construct
YTKTQSN

SEQ ID NO: 42269 - protein, 7 aa, synthetic construct
LHRSATN

SEQ ID NO: 42270 - protein, 7 aa, synthetic construct
HSRLSEN

SEQ ID NO: 42271 - protein, 7 aa, synthetic construct
DVGDRCK

SEQ ID NO: 42272 - protein, 7 aa, synthetic construct
LHRNGEN

SEQ ID NO: 42273 - protein, 7 aa, synthetic construct
LHARGDN

SEQ ID NO: 42274 - protein, 7 aa, synthetic construct
RNDMVYP

SEQ ID NO: 42275 - protein, 7 aa, synthetic construct
YHRSGEN

SEQ ID NO: 42276 - protein, 7 aa, synthetic construct
LHRQTYD

SEQ ID NO: 42277 - protein, 7 aa, synthetic construct
FSRAGAN

SEQ ID NO: 42278 - protein, 7 aa, synthetic construct
LHRTSTN

SEQ ID NO: 42279 - protein, 7 aa, synthetic construct
LHKSTMN

SEQ ID NO: 42280 - protein, 7 aa, synthetic construct
LHRSQDN

SEQ ID NO: 42281 - protein, 7 aa, synthetic construct
LHKQATN

SEQ ID NO: 42282 - protein, 7 aa, synthetic construct
LHRLGTQ

SEQ ID NO: 42283 - protein, 7 aa, synthetic construct
LHKSTLN

SEQ ID NO: 42284 - protein, 7 aa, synthetic construct
LHRSTAN

SEQ ID NO: 42285 - protein, 7 aa, synthetic construct
LHAKSNN

SEQ ID NO: 42286 - protein, 7 aa, synthetic construct
YHKSGSN

SEQ ID NO: 42287 - protein, 7 aa, synthetic construct
LHRLGTG

SEQ ID NO: 42288 - protein, 7 aa, synthetic construct
LHKSQSN

SEQ ID NO: 42289 - protein, 7 aa, synthetic construct
LHKAAQN

SEQ ID NO: 42290 - protein, 7 aa, synthetic construct
LHKSGSN

SEQ ID NO: 42291 - protein, 7 aa, synthetic construct
LHKSTTN

SEQ ID NO: 42292 - protein, 7 aa, synthetic construct
CPPQRTI

SEQ ID NO: 42293 - protein, 7 aa, synthetic construct
LHKSSSN

SEQ ID NO: 42294 - protein, 7 aa, synthetic construct
LHRTMTN

SEQ ID NO: 42295 - protein, 7 aa, synthetic construct
YTKSDKF

SEQ ID NO: 42296 - protein, 7 aa, synthetic construct
IHKLSMN

SEQ ID NO: 42297 - protein, 7 aa, synthetic construct
YHKSGQN

SEQ ID NO: 42298 - protein, 7 aa, synthetic construct
LHKSATN

SEQ ID NO: 42299 - protein, 7 aa, synthetic construct
YVKHDTH

SEQ ID NO: 42300 - protein, 7 aa, synthetic construct
LHKTGIN

SEQ ID NO: 42301 - protein, 7 aa, synthetic construct
NPTGCET

SEQ ID NO: 42302 - protein, 7 aa, synthetic construct
LHRTSQN

SEQ ID NO: 42303 - protein, 7 aa, synthetic construct
YVKTDMK

SEQ ID NO: 42304 - protein, 7 aa, synthetic construct
LHKSMTN

SEQ ID NO: 42305 - protein, 7 aa, synthetic construct
YHKLNIV

SEQ ID NO: 42306 - protein, 7 aa, synthetic construct
YIKHDLS

SEQ ID NO: 42307 - protein, 7 aa, synthetic construct
YVKNDKN

SEQ ID NO: 42308 - protein, 7 aa, synthetic construct
YVKTDSR

SEQ ID NO: 42309 - protein, 7 aa, synthetic construct
YIKHDQN

SEQ ID NO: 42310 - protein, 7 aa, synthetic construct
VEDSNCR

SEQ ID NO: 42311 - protein, 7 aa, synthetic construct
LHKYTVN

SEQ ID NO: 42312 - protein, 7 aa, synthetic construct
LCKTCTN

SEQ ID NO: 42313 - protein, 7 aa, synthetic construct
LHKSAMN

SEQ ID NO: 42314 - protein, 7 aa, synthetic construct
YVKNDQK

SEQ ID NO: 42315 - protein, 7 aa, synthetic construct
LHKATSN

SEQ ID NO: 42316 - protein, 7 aa, synthetic construct
YARGGSG

SEQ ID NO: 42317 - protein, 7 aa, synthetic construct
LHKSANN

SEQ ID NO: 42318 - protein, 7 aa, synthetic construct
IGTRCFD

SEQ ID NO: 42319 - protein, 7 aa, synthetic construct
WNVLTCN

SEQ ID NO: 42320 - protein, 7 aa, synthetic construct
KHGGLCM

SEQ ID NO: 42321 - protein, 7 aa, synthetic construct
FHKAGFN

SEQ ID NO: 42322 - protein, 7 aa, synthetic construct
CRIGKNP

SEQ ID NO: 42323 - protein, 7 aa, synthetic construct
WVKSDTM

SEQ ID NO: 42324 - protein, 7 aa, synthetic construct
LHKSALN

SEQ ID NO: 42325 - protein, 7 aa, synthetic construct
LHKLQNS

SEQ ID NO: 42326 - protein, 7 aa, synthetic construct
DSGTCKA

SEQ ID NO: 42327 - protein, 7 aa, synthetic construct
YHKLSTG

SEQ ID NO: 42328 - protein, 7 aa, synthetic construct
YVKTDKY

SEQ ID NO: 42329 - protein, 7 aa, synthetic construct
LHKSTNN

SEQ ID NO: 42330 - protein, 7 aa, synthetic construct
YVHSNTK

SEQ ID NO: 42331 - protein, 7 aa, synthetic construct
LHKSMQN

SEQ ID NO: 42332 - protein, 7 aa, synthetic construct
NVRCESE

SEQ ID NO: 42333 - protein, 7 aa, synthetic construct
YHKLSAG

SEQ ID NO: 42334 - protein, 7 aa, synthetic construct
WNKSGQG

SEQ ID NO: 42335 - protein, 7 aa, synthetic construct
LHKTGNN

SEQ ID NO: 42336 - protein, 7 aa, synthetic construct
CDPTKKS

SEQ ID NO: 42337 - protein, 7 aa, synthetic construct
CKGPEQV

SEQ ID NO: 42338 - protein, 7 aa, synthetic construct
KFDHMGT

SEQ ID NO: 42339 - protein, 7 aa, synthetic construct
GTACGKL

SEQ ID NO: 42340 - protein, 7 aa, synthetic construct
YIKNDKS

SEQ ID NO: 42341 - protein, 7 aa, synthetic construct
YHRTNTG

SEQ ID NO: 42342 - protein, 7 aa, synthetic construct
THRLASN

SEQ ID NO: 42343 - protein, 7 aa, synthetic construct
SYKNSTY

SEQ ID NO: 42344 - protein, 7 aa, synthetic construct
YVKHGTT

SEQ ID NO: 42345 - protein, 7 aa, synthetic construct
GDSEKCR

SEQ ID NO: 42346 - protein, 7 aa, synthetic construct
YVKSSNQ

SEQ ID NO: 42347 - protein, 7 aa, synthetic construct
YLKSMSN

SEQ ID NO: 42348 - protein, 7 aa, synthetic construct
LHKHSFD

SEQ ID NO: 42349 - protein, 7 aa, synthetic construct
ITGNLKC

SEQ ID NO: 42350 - protein, 7 aa, synthetic construct
WIKSVNT

SEQ ID NO: 42351 - protein, 7 aa, synthetic construct
CNNFLSE

SEQ ID NO: 42352 - protein, 7 aa, synthetic construct
IKYITKD

SEQ ID NO: 42353 - protein, 7 aa, synthetic construct
VRDKHGN

SEQ ID NO: 42354 - protein, 7 aa, synthetic construct
KWDHAGS

SEQ ID NO: 42355 - protein, 7 aa, synthetic construct
MSCKDTC

SEQ ID NO: 42356 - protein, 7 aa, synthetic construct
MNKHVHS

SEQ ID NO: 42357 - protein, 7 aa, synthetic construct
IKYQTKD

SEQ ID NO: 42358 - protein, 7 aa, synthetic construct
IKYSTSA

SEQ ID NO: 42359 - protein, 7 aa, synthetic construct
SPSPGCM

SEQ ID NO: 42360 - protein, 7 aa, synthetic construct
MESCAKN

SEQ ID NO: 42361 - protein, 7 aa, synthetic construct
EKFIHSS

SEQ ID NO: 42362 - protein, 7 aa, synthetic construct
KYDHMGT

SEQ ID NO: 42363 - protein, 7 aa, synthetic construct
GEKLYRA

SEQ ID NO: 42364 - protein, 7 aa, synthetic construct
INNLCVA

SEQ ID NO: 42365 - protein, 7 aa, synthetic construct
KYDAKGY

SEQ ID NO: 42366 - protein, 7 aa, synthetic construct
YYKSSAS

SEQ ID NO: 42367 - protein, 7 aa, synthetic construct
RCDKMCS

SEQ ID NO: 42368 - protein, 7 aa, synthetic construct
MHKVTHS

SEQ ID NO: 42369 - protein, 7 aa, synthetic construct
SMAYIKQ

SEQ ID NO: 42370 - protein, 7 aa, synthetic construct
SSYLQTK

SEQ ID NO: 42371 - protein, 7 aa, synthetic construct
YVKHDKS

SEQ ID NO: 42372 - protein, 7 aa, synthetic construct
LSRTTSN

SEQ ID NO: 42373 - protein, 7 aa, synthetic construct
KWDHAGA

SEQ ID NO: 42374 - protein, 7 aa, synthetic construct
LTALRKV

SEQ ID NO: 42375 - protein, 7 aa, synthetic construct
KFDHTSK

SEQ ID NO: 42376 - protein, 7 aa, synthetic construct
KFDHTGS

SEQ ID NO: 42377 - protein, 7 aa, synthetic construct
CRANAMP

SEQ ID NO: 42378 - protein, 7 aa, synthetic construct
KFDHMGS

SEQ ID NO: 42379 - protein, 7 aa, synthetic construct
KFDHRGE

SEQ ID NO: 42380 - protein, 7 aa, synthetic construct
CAKFLVS

SEQ ID NO: 42381 - protein, 7 aa, synthetic construct
KFDHQGV

SEQ ID NO: 42382 - protein, 7 aa, synthetic construct
AWLKEGT

SEQ ID NO: 42383 - protein, 7 aa, synthetic construct
KFDHQGN

SEQ ID NO: 42384 - protein, 33 aa, synthetic construct
YMFLSHTAKRAGILMNQSTVNGATHNFIPLYDN

SEQ ID NO: 42385 - protein, 31 aa, synthetic construct
YMLSHTAKRAGILMNQSTVNATHNFIPLYDN

SEQ ID NO: 42386 - protein, 34 aa, synthetic construct
YMLSHTAKRAGILMNQSTVGAGFHILNPSTVYDN

SEQ ID NO: 42387 - protein, 21 aa, synthetic construct
LYAHSKRAGHILMNQSTVGPD

SEQ ID NO: 42388 - protein, 21 aa, synthetic construct
LYAHSKRAGHILMNQSTVGPN

SEQ ID NO: 42389 - protein, 28 aa, synthetic construct
YSKAILMNQSTVGYPTQVFLHSAEDIMN

SEQ ID NO: 42390 - protein, 21 aa, synthetic construct
LYSRKVITLASAPRYFHIKWD

SEQ ID NO: 42391 - protein, 35 aa, synthetic construct
FLMYHKRALMAGLMNQSTADEFHILMNQPSTVYDN

SEQ ID NO: 42392 - protein, 33 aa, synthetic construct
LMYHKRALMAGLMNQSTADEFHILMNQPSTVYN

SEQ ID NO: 42393 - protein, 33 aa, synthetic construct
LMYHKRALMAGLMNQSTADEFHILMNQPSTVYD

SEQ ID NO: 42394 - protein, 21 aa, synthetic construct
LMYHKRLSQGTNLPTVIQLAD

SEQ ID NO: 42395 - protein, 14 aa, synthetic construct
FSRLGAHNLVSPTN

SEQ ID NO: 42396 - protein, 13 aa, synthetic construct
FARTSNGYFHPAN

SEQ ID NO: 42397 - protein, 11 aa, synthetic construct
FHKRLGIPSND

SEQ ID NO: 42398 - protein, 19 aa, synthetic construct
YLHAKRNAGQLSPLINDTN

SEQ ID NO: 42399 - protein, 37 aa, synthetic construct
AFHILNPRSTVYADEFGHIKLMNQRSTWYSSTNGIRV

SEQ ID NO: 42400 - protein, 17 aa, synthetic construct
FLYDEHNQSTSSTNGIV

SEQ ID NO: 42401 - protein, 30 aa, synthetic construct
VPISTHAADEFGHIKLMNQRSTYSSTNGIV

SEQ ID NO: 42402 - protein, 21 aa, synthetic construct
AFILPSTVYDENQSTSTSNGR

SEQ ID NO: 42403 - protein, 13 aa, synthetic construct
REDQDTSSTNGIV

SEQ ID NO: 42404 - protein, 30 aa, synthetic construct
RTLMSGDNEGEDIFHSAMPVYDAVSTYFAP

SEQ ID NO: 42405 - protein, 20 aa, synthetic construct
RTMLSYSAMIFPDAVSTYFP

SEQ ID NO: 42406 - protein, 19 aa, synthetic construct
RTMSYSAMIFPDAVSTYFA

SEQ ID NO: 42407 - protein, 23 aa, synthetic construct
RGTDSNEEDPSGDTEHNVATYFP

SEQ ID NO: 42408 - protein, 19 aa, synthetic construct
RGLTDSDPSGDEHNVTYFP

SEQ ID NO: 42409 - protein, 17 aa, synthetic construct
TRKYWEWYQSTGDPAAP

SEQ ID NO: 42410 - protein, 22 aa, synthetic construct
LCKRPCLSDANQHPVETGADNS

SEQ ID NO: 42411 - protein, 27 aa, synthetic construct
YFWFYTSGITVQMHIPHLMAQTVASDE

SEQ ID NO: 42412 - protein, 20 aa, synthetic construct
YFWFYTSGITVQMHKRASDE

SEQ ID NO: 42413 - protein, 23 aa, synthetic construct
YFWFYTSGKRIPHLMAQTVASDE

SEQ ID NO: 42414 - protein, 17 aa, synthetic construct
YFTGKRQMNITRHKVLE

SEQ ID NO: 42415 - protein, 20 aa, synthetic construct
YFTSHAGKRTIPHLMAQTDN

SEQ ID NO: 42416 - protein, 18 aa, synthetic construct
YWTGKMVTPVIHQTMLED

SEQ ID NO: 42417 - protein, 20 aa, synthetic construct
YFFSHAQGKQRIVLKHRQME

SEQ ID NO: 42418 - protein, 19 aa, synthetic construct
KRDSNEFTKSRVTSGVFWY

SEQ ID NO: 42419 - protein, 18 aa, synthetic construct
KRDDFYTSVHTSGVAFWY

SEQ ID NO: 42420 - protein, 18 aa, synthetic construct
SRGNTMQDGTVSNYSKRW

SEQ ID NO: 42421 - protein, 23 aa, synthetic construct
RVDIQKMLGSEARQDRTASGKNW

SEQ ID NO: 42422 - protein, 27 aa, synthetic construct
DIEQVSKLMGPEASDQTSARDSETGAW

SEQ ID NO: 42423 - protein, 21 aa, synthetic construct
GESPGADEPNGHTSNVRKSWY

SEQ ID NO: 42424 - protein, 17 aa, synthetic construct
REDEPNGHTSNVRKSWY

SEQ ID NO: 42425 - protein, 21 aa, synthetic construct
GGSGESAPDTGSSSTHKRANW

SEQ ID NO: 42426 - protein, 22 aa, synthetic construct
VIRNDAGSLTSHGKREGWRADG

SEQ ID NO: 42427 - protein, 23 aa, synthetic construct
LMWFRWKTYDSGTPGSNARAPSY

SEQ ID NO: 42428 - protein, 21 aa, synthetic construct
PNKYFARKSPVARILSEEDML

SEQ ID NO: 42429 - protein, 7 aa, synthetic construct
NNSTRGG

SEQ ID NO: 42430 - protein, 7 aa, synthetic construct
GNSARNI

SEQ ID NO: 42431 - protein, 7 aa, synthetic construct
GNSVRDF

SEQ ID NO: 42432 - DNA, 19 bp, synthetic construct
  source 1..19: mol_type = other DNA
ccgtgacccaggacacctc

SEQ ID NO: 42433 - DNA, 23 bp, synthetic construct
  source 1..23: mol_type = other DNA
gccatcttaatgtcgcccttcag

SEQ ID NO: 42434 - protein, 39 aa, unidentified
NFAEKFKEAVKDYFAKFWDPAAEKLKEAVKDYFAKLWDC

SEQ ID NO: 42435 - protein, 14 aa, unidentified
FSRLGAHNLVSPTN

SEQ ID NO: 42436 - protein, 7 aa, unidentified
FSRLGXN

SEQ ID NO: 42437 - protein, 8 aa, unidentified
AHNLVSPT

SEQ ID NO: 42438 - DNA, 26 bp, synthetic construct
  source 1..26: mol_type = other DNA
gctatgggactattgctgtgatcgtc

SEQ ID NO: 42439 - DNA, 23 bp, synthetic construct
  source 1..23: mol_type = other DNA
ccaatataagcgacgtgctgcag

SEQ ID NO: 42440 - DNA, 21 bp, synthetic construct
  source 1..21: mol_type = other DNA
tgtggagatgaaactggctgc

SEQ ID NO: 42441 - DNA, 23 bp, synthetic construct
  source 1..23: mol_type = other DNA
agtgcaatagctgcaaagcagag

SEQ ID NO: 42442 - DNA, 22 bp, synthetic construct
  source 1..22: mol_type = other DNA
aacaagagcgtgaagctctctg

SEQ ID NO: 42443 - DNA, 19 bp, synthetic construct
  source 1..19: mol_type = other DNA
ctccaggaccccaggagtc

SEQ ID NO: 42444 - DNA, 25 bp, synthetic construct
  source 1..25: mol_type = other DNA
ggaaaacaagagtgtgaagctcacg

SEQ ID NO: 42445 - DNA, 20 bp, synthetic construct
  source 1..20: mol_type = other DNA
ggagagctgtccccacactg

SEQ ID NO: 42446 - DNA, 20 bp, synthetic construct
  source 1..20: mol_type = other DNA
cttcttctgcattacggggc

SEQ ID NO: 42447 - DNA, 20 bp, synthetic construct
  source 1..20: mol_type = other DNA
accacagtccatgccatcac

SEQ ID NO: 42448 - DNA, 20 bp, synthetic construct
  source 1..20: mol_type = other DNA
tccaccaccctgttgctgta

SEQ ID NO: 42449 - DNA, 23 bp, synthetic construct
  source 1..23: mol_type = other DNA
aagggacctttaccagtgatgtg

SEQ ID NO: 42450 - DNA, 21 bp, synthetic construct
  source 1..21: mol_type = other DNA
acttactctcgccttcctcgg

SEQ ID NO: 42451 - DNA, 21 bp, synthetic construct
  source 1..21: mol_type = other DNA
ctaacttgtttggtggggaac

SEQ ID NO: 42452 - DNA, 22 bp, synthetic construct
  source 1..22: mol_type = other DNA
cttcatctgcagccagtttcat

SEQ ID NO: 42453 - DNA, 27 bp, synthetic construct
  source 1..27: mol_type = other DNA
ctcgtgaggctggatctcaaaaagatg

SEQ ID NO: 42454 - DNA, 30 bp, synthetic construct
  source 1..30: mol_type = other DNA
caccaggtaaacaagtctaccgttcttatc

SEQ ID NO: 42455 - DNA, 27 bp, synthetic construct
  source 1..27: mol_type = other DNA
actgggtctaagttaccatttgactgc

SEQ ID NO: 42456 - protein, 736 aa, Adeno-associated virus 9; identical to SEQ ID NO: 20506

SEQ ID NO: 42457 - protein, 736 aa, synthetic construct; identical to SEQ ID NO: 20507

SEQ ID NO: 42458 - protein, 736 aa, synthetic construct
MAADGYLPDWLEDNLSEGIREWWDLKPGAPKPKANQQKQDDGRGLVLPGYKYLGPFNGLDKGEPVNAADAAALEHDKAYDQQLKAGDNPYLRYNHADAEFQERLQEDTSFGGNLGRAVFQAKKRVLEPLGLVEEGAKTAPGKKRPVEQSPQEPDSSSGIGKTGQQPAKKRLNFGQTGDSESVPDPQPLGEPPATPAAVGPTTMASGGGAPMADNNEGADGVGNASGNWHCDSTWLGDRVITTSTRTWALPTYNNHLYKQISSASTGASNDNHYFGYSTPWGYFDFNRFHCHFSPRDWQRLINNNWGFRPKRLNFKLFNIQVKEVTTNDGVTTIANNLTSTVQVFSDSEYQLPYVLGSAHQGCLPPFPADVFMIPQYGYLTLNNGSQAVGRSSFYCLEYFPSQMLRTGNNFTFSYTFEEVPFHSSYAHSQSLDRLMNPLIDQYLYYLNRTQNQSGSAQNKDLLFSRGSPAGMSVQPKNWLPGPCYRQQRVSKTKTDNNNSNFTWTGASKYNLNGRESIINPGTAMASHKDDEDKFFPMSGVMIFGKESAGASNTALDNVMITDEEEIKATNPVATERFGTVAVNFQSSSTDPATGDVHAMGALPGMVWQDRDVYLQGPIWAKIPHTDGHFHPSPLMGGFGLKNPPPQILIKNTPVPANPPAEFSATKFASFITQYSTGQVSVEIEWELQKENSKRWNPEVQYTSNYAKSANVDFTVDNNGLYTEPRPIGTRYLTRPL

SEQ ID NO: 42459 - protein, 735 aa, Adeno-associated virus 1 [sequence omitted]

SEQ ID NO: 42460 - protein, 736 aa, Adeno-associated virus 2
MAADGYLPDWLEDNLSEGIREWWALKPGVPQPKANQQHQDNRRGLVLPGYKYLGPGNGLDKGEPVNEADAAALEHDKAYDQQLKAGDNPYLKYNHADAEFQERLQEDTSFGGNLGRAVFQAKKRILEPLGLVEEAAKTAPGKKGAVDQSPQEPDSSSGVGKSGKQPARKRLNFGQTGDSESVPDPQPLGEPPAAPTSLGSNTMASGGGAPMADNNEGADGVGNSSGNWHCDSQWLGDRVITTSTRTWALPTYNNHLYKQISSQSGASNDNHYFGYSTPWGYFDFNRFHCHFSPRDWQRLINNNWGFRPKKLSFKLFNIQVRGVTQNDGTTTIANNLTSTVQVFTDSEYQLPYVLGSAHQGCLPPFPADVFMVPQYGYLTLNNGSQAVGRSSFYCLEYFPSQMLRTGNNFQFSYTFEDVPFHSSYAHSQSLDRLMNPLIDQYLYYLNRTQGTTSGTTNQSRLLFSQAGPQSMSLQARNWLPGPCYRQQRLSKTANDNNNSNFPWTAASKYHLNGRDSLVNPGPAMASHKDDEEKFFPMHGNLIFGKEGTTASNAELDNVMITDEEEIRTTNPVATEQYGTVANNLQSSNTAPTTGTVNHQGALPGMVWQDRDVYLQGPIWAKIPHTDGHFHPSPLMGGFGLKHPPPQIMIKNTPVPANPPTTFSPAKFASFITQYSTGQVSVEIEWELQKENSKRWNPEIQYTSNYNKSVNVDFTVDTNGVYSEPRPIGTRYLTRNL

SEQ ID NO: 42461 - protein, 736 aa, Adeno-associated virus 3
MAADGYLPDWLEDNLSEGIREWWALKPGVPQPKANQQHQDNRRGLVLPGYKYLGPGNGLDKGEPVNEADAAALEHDKAYDQQLKAGDNPYLKYNHADAEFQERLQEDTSFGGNLGRAVFQAKKRILEPLGLVEEAAKTAPGKKRPVDQSPQEPDSSSGVGKSGKQPARKRLNFGQTGDSESVPDPQPLGEPPAAPTSLGSNTMASGGGAPMADNNEGADGVGNSSGNWHCDSQWLGDRVITTSTRTWALPTYNNHLYKQISSQSGASNDNHYFGYSTPWGYFDFNRFHCHFSPRDWQRLINNNWGFRPKKLSFKLFNIQVKEVTQNDGTTTIANNLTSTVQVFTDSEYQLPYVLGSAHQGCLPPFPADVFMVPQYGYLTLNNGSQAVGRSSFYCLEYFPSQMLRTGNNFQFSYTFEDVPFHSSYAHSQSLDRLMNPLIDQYLYYLNRTQGTTSGTTNQSRLLFSQAGPQSMSLQARNWLPGPCYRQQRLSKTANDNNNSNFPWTAASKYHLNGRDSLVNPGPAMASHKDDEEKFFPMHGNLIFGKEGTTASNAELDNVMITDEEEIRTTNPVATEQYGTVANNLQSSNTAPTTRTVNDQGALPGMVWQDRDVYLQGPIWAKIPHTDGHFHPSPLMGGFGLKHPPPQIMIKNTPVPANPPTTFSPAKFASFITQYSTGQVSVEIEWELQKENSKRWNPEIQYTSNYNKSVNVDFTVDTNGVYSEPRPIGTRYLTRNL

SEQ ID NO: 42462 - protein, 734 aa, Adeno-associated virus 3B
MTDGYLPDWLEDNLSEGVREWWALQPGAPKPKANQQHQDNARGLVLPGYKYLGPGNGLDKGEPVNAADAAALEHDKAYDQQLKAGDNPYLKYNHADAEFQQRLQGDTSFGGNLGRAVFQAKKRVLEPLGLVEQAGETAPGKKRPLIESPQQPDSSTGIGKKGKQPAKKKLVFEDETGAGDGPPEGSTSGAMSDDSEMRAAAGGAAVEGGQGADGVGNASGDWHCDSTWSEGHVTTTSTRTWVLPTYNNHLYKRLGESLQSNTYNGFSTPWGYFDFNRFHCHFSPRDWQRLINNNWGMRPKAMRVKIFNIQVKEVTTSNGETTVANNLTSTVQIFADSSYELPYVMDAGQEGSLPPFPNDVFMVPQYGYCGLVTGNTSQQQTDRNAFYCLEYFPSQMLRTGNNFEITYSFEKVPFHSMYAHSQSLDRLMNPLIDQYLWGLQSTTTGTTLNAGTATTNFTKLRPTNFSNFKKNWLPGPSIKQQGFSKTANQNYKIPATGSDSLIKYETHSTLDGRWSALTPGPPMATAGPADSKFSNSQLIFAGPKQNGNTATVPGTLIFTSEEELAATNATDTDMWGNLPGGDQSNSNLPTVDRLTALGAVPGMVWQNRDIYYQGPIWAKIPHTDGHFHPSPLIGGFGLKHPPPQIFIKNTPVPANPATTFSSTPVNSFITQYSTGQVSVQIDWEIQKERSKRWNPEVQFTSNYGQQNSLLWAPDAAGKYTEPRAIGTRYLTHHL

SEQ ID NO: 42463 - protein, 724 aa, Adeno-associated virus 4
MSFVDHPPDWLEEVGEGLREFLGLEAGPPKPKPNQQHQDQARGLVLPGYNYLGPGNGLDRGEPVNRADEVAREHDISYNEQLEAGDNPYLKYNHADAEFQEKLADDTSFGGNLGKAVFQAKKRVLEPFGLVEEGAKTAPTGKRIDDHFPKRKKARTEEDSKPSTSSDAEAGPSGSQQLQIPAQPASSLGADTMSAGGGGPLGDNNQGADGVGNASGDWHCDSTWMGDRVVTKSTRTWVLPSYNNHQYREIKSGSVDGSNANAYFGYSTPWGYFDFNRFHSHWSPRDWQRLINNYWGFRPRSLRVKIFNIQVKEVTVQDSTTTIANNLTSTVQVFTDDDYQLPYVVGNGTEGCLPAFPPQVFTLPQYGYATLNRDNTENPTERSSFFCLEYFPSKMLRTGNNFEFTYNFEEVPFHSSFAPSQNLFKLANPLVDQYLYRFVSTNNTGGVQFNKNLAGRYANTYKNWFPGPMGRTQGWNLGSGVNRASVSAFATTNRMELEGASYQVPPQPNGMTNNLQGSNTYALENTMIFNSQPANPGTTATYLEGNMLITSESETQPVNRVAYNVGGQMATNNQSSTTAPATGTYNLQEIVPGSVWMERDVYLQGPIWAKIPETGAHFHPSPAMGGFGLKHPPPMMLIKNTPVPGNITSFSDVPVSSFITQYSTGQVTVEMEWELKKENSKRWNPEIQYTNNYNDPQFVDFAPDSTGEYRTTRPIGTRYLTRPL

SEQ ID NO: 42464 - protein, 736 aa, Adeno-associated virus 5
MAADGYLPDWLEDNLSEGIREWWDLKPGAPKPKANQQKQDDGRGLVLPGYKYLGPFNGLDKGEPVNAADAAALEHDKAYDQQLKAGDNPYLRYNHADAEFQERLQEDTSFGGNLGRAVFQAKKRVLEPFGLVEEGAKTAPGKKRPVEQSPQEPDSSSGIGKTGQQPAKKRLNFGQTGDSESVPDPQPLGEPPATPAAVGPTTMASGGGAPMADNNEGADGVGNASGNWHCDSTWLGDRVITTSTRTWALPTYNNHLYKQISSASTGASNDNHYFGYSTPWGYFDFNRFHCHFSPRDWQRLINNNWGFRPKRLNFKLFNIQVKEVTTNDGVTTIANNLTSTVQVFSDSEYQLPYVLGSAHQGCLPPFPADVFMIPQYGYLTLNNGSQAVGRSSFYCLEYFPSQMLRTGNNFTFSYTFEDVPFHSSYAHSQSLDRLMNPLIDQYLYYLNRTQNQSGSAQNKDLLFSRGSPAGMSVQPKNWLPGPCYRQQRVSKTKTDNNNSNFTWTGASKYNLNGRESIINPGTAMASHKDDKDKFFPMSGVMIFGKESAGASNTALDNVMITDEEEIKATNPVATERFGTVAVNLQSSSTDPATGDVHVMGALPGMVWQDRDVYLQGPIWAKIPHTDGHFHPSPLMGGFGLKHPPPQILIKNTPVPANPPAEFSATKFASFITQYSTGQVSVEIEWELQKENSKRWNPEVQYTSNYAKSANVDFTVDNNGLYTEPRPIGTRYLTRPL

SEQ ID NO: 42465 - protein, 737 aa, Adeno-associated virus 6
MAADGYLPDWLEDNLSEGIREWWDLKPGAPKPKANQQKQDNGRGLVLPGYKYLGPFNGLDKGEPVNAADAAALEHDKAYDQQLKAGDNPYLRYNHADAEFQERLQEDTSFGGNLGRAVFQAKKRVLEPLGLVEEGAKTAPAKKRPVEPSPQRSPDSSTGIGKKGQQPARKRLNFGQTGDSESVPDPQPLGEPPAAPSSVGSGTVAAGGGAPMADNNEGADGVGNASGNWHCDSTWLGDRVITTSTRTWALPTYNNHLYKQISSETAGSTNDNTYFGYSTPWGYFDFNRFHCHFSPRDWQRLINNNWGFRPKKLRFKLFNIQVKEVTTNDGVTTIANNLTSTIQVFSDSEYQLPYVLGSAHQGCLPPFPADVFMIPQYGYLTLNNGSQSVGRSSFYCLEYFPSQMLRTGNNFEFSYSFEDVPFHSSYAHSQSLDRLMNPLIDQYLYYLARTQSNPGGTAGNRELQFYQGGPSTMAEQAKNWLPGPCFRQQRVSKTLDQNNNSNFAWTGATKYHLNGRNSLVNPGVAMATHKDDEDRFFPSSGVLIFGKTGATNKTTLENVLMTNEEEIRPTNPVATEEYGIVSSNLQAANTAAQTQVVNNQGALPGMVWQNRDVYLQGPIWAKIPHTDGNFHPSPLMGGFGLKHPPPQILIKNTPVPANPPEVFTPAKFASFITQYSTGQVSVEIEWELQKENSKRWNPEIQYTSNFEKQTGVDFAVDSQGVYSEPRPIGTRYLTRNL

SEQ ID NO: 42466 - protein, 738 aa, Adeno-associated virus 7
MAADGYLPDWLEDNLSEGIREWWALKPGAPKPKANQQKQDDGRGLVLPGYKYLGPFNGLDKGEPVNAADAAALEHDKAYDQQLQAGDNPYLRYNHADAEFQERLQEDTSFGGNLGRAVFQAKKRVLEPLGLVEEGAKTAPGKKRPVEPSPQRSPDSSTGIGKKGQQPARKRLNFGQTGDSESVPDPQPLGEPPAAPSGVGPNTMAAGGGAPMADNNEGADGVGSSSGNWHCDSTWLGDRVITTSTRTWALPTYNNHLYKQISNGTSGGATNDNTYFGYSTPWGYFDFNRFHCHFSPRDWQRLINNNWGFRPKRLSFKLFNIQVKEVTQNEGTKTIANNLTSTIQVFTDSEYQLPYVLGSAHQGCLPPFPADVFMIPQYGYLTLNNGSQAVGRSSFYCLEYFPSQMLRTGNNFQFTYTFEDVPFHSSYAHSQSLDRLMNPLIDQYLYYLSRTQTTGGTANTQTLGFSQGGPNTMANQAKNWLPGPCYRQQRVSTTTGQNNNSNFAWTAGTKYHLNGRNSLANPGIAMATHKDDEERFFPSNGILIFGKQNAARDNADYSDVMLTSEEEIKTTNPVATEEYGIVADNLQQQNTAPQIGTVNSQGALPGMVWQNRDVYLQGPIWAKIPHTDGNFHPSPLMGGFGLKHPPPQILIKNTPVPADPPTTFNQSKLNSFITQYSTGQVSVEIEWELQKENSKRWNPEIQYTSNYYKSTSVDFAVNTEGVYSEPRPIGTRYLTRNL

SEQ ID NO: 42467 - protein, 736 aa, synthetic construct
MAADGYLPDWLEDNLSEGIREWWDLKPGAPKPKANQQKQDDGRGLVLPGYKYLGPFNGLDKGEPVNAADAAALEHDKAYDQQLKAGDNPYLRYNHADAEFQERLQEDTSFGGNLGRAVFQAKKRVLEPLGLVEEGAKTAPGKKRPVEQSPQEPDSSSGIGKTGQQPAKKRLNFGQTGDSESVPDPQPLGEPPAAPSGLGPNTMASGGGAPMADNNEGADGVGNSSGNWHCDSTWLGDRVITTSTRTWALPTYNNHLYKQISNGTSGGSTNDNTYFGYSTPWGYFDFNRFHCHFSPRDWQRLINNNWGFRPKRLNFKLFNIQVKEVTTNEGTKTIANNLTSTVQVFTDSEYQLPYVLGSAHQGCLPPFPADVFMVPQYGYLTLNNGSQALGRSSFYCLEYFPSQMLRTGNNFQFSYTFEDVPFHSSYAHSQSLDRLMNPLIDQYLYYLVRTQTTGTGGTQTLAFSQAGPSSMANQARNWVPGPCYRQQRVSTTTNQNNNSNFAWTGAAKFKLNGRDSLMNPGVAMASHKDDDDRFFPSSGVLIFGKQGAGNDGVDYSQVLITDEEEIKATNPVATEEYGAVAINNQAANTQAQTGLVHNQGVIPGMVWQNRDVYLQGPIWAKIPHTDGNFHPSPLMGGFGLKHPPPQILIKNTPVPADPPLTFNQAKLNSFITQYSTGQVSVEIEWELQKENSKRWNPEIQYTSNYYKSTNVDFAVNTEGVYSEPRPIGTRYLTRNL

SEQ ID NO: 42468 - protein, 738 aa, synthetic construct
MAADGYLPDWLEDNLSEGIREWWDLKPGAPKPKANQQKQDDGRGLVLPGYKYLGPFNGLDKGEPVNAADAAALEHDKAYDQQLKAGDNPYLRYNHADAEFQERLQEDTSFGGNLGRAVFQAKKRVLEPLGLVEEGAKTAPGKKRPVEPSPQRSPDSSTGIGKKGQQPAKKRLNFGQTGDSESVPDPQPIGEPPAGPSGLGSGTMAAGGGAPMADNNEGADGVGSSSGNWHCDSTWLGDRVITTSTRTWALPTYNNHLYKQISNGTSGGSTNDNTYFGYSTPWGYFDFNRFHCHFSPRDWQRLINNNWGFRPKRLNFKLFNIQVKEVTQNEGTKTIANNLTSTIQVFTDSEYQLPYVLGSAHQGCLPPFPADVFMIPQYGYLTLNNGSQAVGRSSFYCLEYFPSQMLRTGNNFEFSYQFEDVPFHSSYAHSQSLDRLMNPLIDQYLYYLSRTQSTGGTAGTQQLLFSQAGPNNMSAQAKNWLPGPCYRQQRVSTTLSQNNNSNFAWTGATKYHLNGRDSLVNPGVAMATHKDDEERFFPSSGVLMFGKQGAGKDNVDYSSVMLTSEEEIKTTNPVATEQYGVVADNLQQQNAAPIVGAVNSQGALPGMVWQNRDVYLQGPIWAKIPHTDGNFHPSPLMGGFGLKHPPPQILIKNTPVPADPPTTFSQAKLASFITQYSTGQVSVEIEWELQKENSKRWNPEIQYTSNYYKSTNVDFAVNTDGTYSEPRPIGTRYLTRNL

SEQ ID NO: 42469 - protein, 733 aa, synthetic construct
MAADGYLPDWLEDNLSEGIREWWDLKPGAPKPKANQQKQDDGRGLVLPGYKYLGPFNGLDKGEPVNAADAAALEHDKAYDQQLKAGDNPYLRYNHADAEFQERLQEDTSFGGNLGRAVFQAKKRVLEPLGLVEEGAKTAPGKKRPLESPQEPDSSSGIGKKGKQPAKKRLNFEEDTGAGDGPPEGSDTSAMSSDIEMRAAPGGNAVDAGQGSDGVGNASGDWHCDSTWSEGKVTTTSTRTWVLPTYNNHLYLRLGTTSNSNTYNGFSTPWGYFDFNRFHCHFSPRDWQRLINNNWGLRPKAMRVKIFNIQVKEVTTSNGETTVANNLTSTVQIFADSSYELPYVMDAGQEGSLPPFPNDVFMVPQYGYCGIVTGENQNQTDRNAFYCLEYFPSQMLRTGNNFEMAYNFEKVPFHSMYAHSQSLDRLMNPLLDQYLWHLQSTTSGETLNQGNAATTFGKIRSGDFAFYRKNWLPGPCVKQQRFSKTASQNYKIPASGGNALLKYDTHYTLNNRWSNIAPGPPMATAGPSDGDFSNAQLIFPGPSVTGNTTTSANNLLFTSEEEIAATNPRDTDMFGQIADNNQNATTAPITGNVTAMGVLPGMVWQNRDIYYQGPIWAKIPHADGHFHPSPLIGGFGLKHPPPQIFIKNTPVPANPATTFTAARVDSFITQYSTGQVAVQIEWEIEKERSKRWNPEVQFTSNYGNQSSMLWAPDTTGKYTEPRVIGSRYLTNHL

SEQ ID NO: 42470 - protein, 738 aa, Adeno-associated virus 8
MAADGYLPDWLEDNLSEGIREWWDLKPGAPKPKANQQKQDDGRGLVLPGYKYLGPFNGLDKGEPVNAADAAALEHDKAYDQQLKAGDNPYLRYNHADAEFQERLQEDTSFGGNLGRAVFQAKKRVLEPLGLVEEAAKTAPGKKRPVEPSPQRSPDSSTGIGKKGQQPAKKRLNFGQTGESESVPDPQPIGEPPAGPSGLGSGTMAAGGGAPMADNNEGADGVGSSSGNWHCDSTWLGDRVITTSTRTWALPTYNNHLYKQISNGTSGGSTNDNTYFGYSTPWGYFDFNRFHCHFSPRDWQRLINNNWGFRPKRLSFKLFNIQVKEVTQNEGTKTIANNLTSTIQVFTDSEYQLPYVLGSAHQGCLPPFPADVFMIPQYGYLTLNNGSQAVGRSSFYCLEYFPSQMLRTGNNFEFSYTFEDVPFHSSYAHSQSLDRLMNPLIDQYLYYLSRTQSTGGTQGTQQLLFSQAGPANMSAQAKNWLPGPCYRQQRVSTTLSQNNNSNFAWTGATKYHLNGRDSLVNPGVAMATHKDDEERFFPSSGVLMFGKQGAGRDNVDYSSVMLTSEEEIKTTNPVATEQYGVVADNLQQANTGPIVGNVNSQGALPGMVWQNRDVYLQGPIWAKIPHTDGNFHPSPLMGGFGLKHPPPQILIKNTPVPADPPTTFSQAKLASFITQYSTGQVSVEIEWELQKENSKRWNPEIQYTSNYYKSTNVDFAVNTEGTYSEPRPIGTRYLTRNL

SEQ ID NO: 42471 - protein, 733 aa, Adeno-associated virus
MAADGYLPDWLEDNLSEGIREWWDLKPGAPKPKANQQKQDDGRGLVLPGYKYLGPFNGLDKGEPVNAADAAALEHDKAYDQQLKAGDNPYLRYNHADAEFQERLQEDTSFGGNLGRAVFQAKKRVLEPLGLVEEGAKTAPGKKRPLESPQEPDSSSGIGKKGKQPARKRLNFEEDTGAGDGPPEGSDTSAMSSDIEMRAAPGGNAVDAGQGSDGVGNASGDWHCDSTWSEGKVTTTSTRTWVLPTYNNHLYLRLGTTSSSNTYNGFSTPWGYFDFNRFHCHFSPRDWQRLINNNWGLRPKAMRVKIFNIQVKEVTTSNGETTVANNLTSTVQIFADSSYELPYVMDAGQEGSLPPFPNDVFMVPQYGYCGIVTGENQNQTDRNAFYCLEYFPSQMLRTGNNFEMAYNFEKVPFHSMYAHSQSLDRLMNPLLDQYLWHLQSTTSGETLNQGNAATTFGKIRSGDFAFYRKNWLPGPCVKQQRFSKTASQNYKIPASGGNALLKYDTHYTLNNRWSNIAPGPPMATAGPSDGDFSNAQLIFPGPSVTGNTTTSANNLLFTSEEEIAATNPRDTDMFGQIADNNQNATTAPITGNVTAMGVLPGMVWQNRDIYYQGPIWAKIPHADGHFHPSPLIGGFGLKHPPPQIFIKNTPVPANPATTFTAARVDSFITQYSTGQVAVQIEWEIEKERSKRWNPEVQFTSNYGNQSSMLWAPDTTGKYTEPRVIGSRYLTNHL

SEQ ID NO: 42472 - protein, 742 aa, Adeno-associated virus
MAADGYLPDWLEDNLSEGIREWWALKPGAPQPKANQQHQDNGRGLVLPGYKYLGPFNGLDKGEPVNEADAAALEHDKAYDKQLEQGDNPYLKYNHADAEFQQRLATDTSFGGNLGRAVFQAKKRILEPLGLVEEGVKTAPGKKRPLEKTPNRPTNPDSGKAPAKKKQKDGEPADSARRTLDFEDSGAGDGPPEGSSSGEMSHDAEMRAAPGGNAVEAGQGADGVGNASGDWHCDSTWSEGRVTTTSTRTWVLPTYNNHLYLRIGTTANSNTYNGFSTPWGYFDFNRFHCHFSPRDWQRLINNNWGLRPKSMRVKIFNIQVKEVTTSNGETTVANNLTSTVQIFADSTYELPYVMDAGQEGSFPPFPNDVFMVPQYGYCGVVTGKNQNQTDRNAFYCLEYFPSQMLRTGNNFEVSYQFEKVPFHSMYAHSQSLDRMMNPLLDQYLWHLQSTTTGNSLNQGTATTTYGKITTGDFAYYRKNWLPGACIKQQKFSKNANQNYKIPASGGDALLKYDTHTTLNGRWSNMAPGPPMATAGAGDSDFSNSQLIFAGPNPSGNTTTSSNNLLFTSEEEIATTNPRDTDMFGQIADNNQNATTAPHIANLDAMGIVPGMVWQNRDIYYQGPIWAKVPHTDGHFHPSPLMGGFGLKHPPPQIFIKNTPVPANPNTTFSAARINSFLTQYSTGQVAVQIDWEIQKEHSKRWNPEVQFTSNYGTQNSMLWAPDNAGNYHELRAIGSRFLTHHL

SEQ ID NO: 42473 - protein, 733 aa, Adeno-associated virus
  source 1..733: note = species; rh.74 isolate
MTDGYLPDWLEDNLSEGVREWWALQPGAPKPKANQQHQDNARGLVLPGYKYLGPGNGLDKGEPVNAADAAALEHDKAYDQQLKAGDNPYLKYNHADAEFQERLQEDTSFGGNLGRAVFQAKKRILEPLGLVEEAAKTAPGKKRPVEQSPAEPDSSSGIGKSGQQPARKRLNFGQTGDTESVPDPQPLGQPPAAPSGVGSTTMASGGGAPMADNNEGADGVGNSSGNWHCDSQWLGDRVITTSTRTWALPTYNNHLYKQISSQSGATNDNHYFGYSTPWGYFDFNRFHCHFSPRDWQRLINNNWGFRPKRLNFKLFNIQVKEVTQNDGTTTIANNLTSTVQVFTDSEYQLPYVLGSAHQGCLPPFPADVFMVPQYGYLTLNNGSQAVGRSSFYCLEYFPSQMLRTGNNFQFSYTFEDVPFHSSYAHSQSLDRLMNPLIDQYLYYLNRTQTASGTQQSRLLFSQAGPTSMSLQAKNWLPGPCYRQQRLSKQANDNNNSNFPWTGATKYHLNGRDSLVNPGPAMASHKDDKEKFFPMHGTLIFGKEGTNANNADLENVMITDEEEIRTTNPVATEQYGTVSNNLQNSNAGPTTGTVNHQGALPGMVWQDRDVYLQGPIWAKIPHTDGHFHPSPLMGGFGLKHPPPQIMIKNTPVPANPPTNFSAAKFASFITQYSTGQVSVEIEWELQKENSKRWNPEIQYTSNYNKSVNVDFTVDTNGVYSEPRPIGTRYLTRNL

SEQ ID NO: 42474 - protein, 736 aa, synthetic construct
MAADGYLPDWLEDNLSEGIREWWALQPGAPKPKANQQHQDNARGLVLPGYKYLGPGNGLDKGEPVNAADAAALEHDKAYDQQLKAGDNPYLKYNHADAEFQERLKEDTSFGGNLGRAVFQAKKRLLEPLGLVEEAAKTAPGKKRPVDQSPQEPDSSSGVGKSGKQPARKRLNFGQTGDSESVPDPQPLGEPPAAPTSLGSNTMASGGGAPMADNNEGADGVGNSSGNWHCDSQWLGDRVITTSTRTWALPTYNNHLYKQISSQSGASNDNHYFGYSTPWGYFDFNRFHCHFSPRDWQRLINNNWGFRPKKLSFKLFNIQVKEVTQNDGTTTIANNLTSTVQVFTDSEYQLPYVLGSAHQGCLPPFPADVFMVPQYGYLTLNNGSQAVGRSSFYCLEYFPSQMLRTGNNFQFSYTFEDVPFHSSYAHSQSLDRLMNPLIDQYLYYLNRTQGTTSGTTNQSRLLFSQAGPQSMSLQARNWLPGPCYRQQRLSKTANDNNNSNFPWTAASKYHLNGRDSLVNPGPAMASHKDDEEKFFPMHGNLIFGKEGTTASNAELDNVMITDEEEIRTTNPVATEQYGTVANNLQSSNTAPTTRTVNDQGALPGMVWQDRDVYLQGPIWAKIPHTDGHFHPSPLMGGFGLKHPPPQIMIKNTPVPANPPTTFSPAKFASFITQYSTGQVSVEIEWELQKENSKRWNPEIQYTSNYNKSVNVDFTVDTNGVYSEPRPIGTRYLTRPL

SEQ ID NO: 42475 - protein, 737 aa, synthetic construct
MAADGYLPDWLEDTLSEGIRQWWKLKPGPPPPKPAERHKDDSRGLVLPGYKYLGPFNGLDKGEPVNEADAAALEHDKAYDRQLDSGDNPYLKYNHADAEFQERLKEDTSFGGNLGRAVFQAKKRLLEPLGLVEEAAKTAPGKKRPVEHSPVEPDSSSGTGKAGQQPARKRLNFGQTGDADSVPDPQPIGEPPAAPSGVGSLTMAAGGGAPMADNNEGADGVGNSSGNWHCDSTWMGDRVITTSTRTWALPTYNNHLYKQISNSTSGGSSNDNAYFGYSTPWGYFDFNRFHCHFSPRDWQRLINNNWGFRPKRLSFKLFNIQVKEVTQNEGTKTIANNLTSTIQVFTDSEYQLPYVLGSAHQGCLPPFPADVFMIPQYGYLTLNNGSQAVGRSSFYCLEYFPSQMLRTGNNFQFTYTFEDVPFHSSYAHSQSLDRLMNPLIDQYLYYLSRTQTTGGTTNTQTLGFSQGGPNTMANQAKNWLPGPCYRQQRVSKTSADNNNSEYSWTGATKYHLNGRDSLVNPGPAMASHKDDEEKFFPQSGVLIFGKQGSEKTNVDIEKVMITDEEEIRTTNPVATEQYGSVSTNLQRGNRQAATADVNTQGVLPGMVWQDRDVYLQGPIWAKIPHTDGHFHPSPLMGGFGLKHPPPQILIKNTPVPADPPTTFNQSKLNSFITQYSTGQVSVEIEWELQKENSKRWNPEIQYTSNYYKSTSVDFAVNTEGVYSEPRPIGTRYLTRNL

SEQ ID NO: 42476 - protein, 743 aa, synthetic construct; identical to SEQ ID NO: 20508

SEQ ID NO: 42477 - protein, 743 aa, synthetic construct
MAADGYLPDWLEDNLSEGIREWWALKPGAPQPKANQQHQDNARGLVLPGYKYLGPGNGLDKGEPVNAADAAALEHDKAYDQQLKAGDNPYLKYNHADAEFQERLKEDTSFGGNLGRAVFQAKKRLLEPLGLVEEAAKTAPGKKRPVEQSPQEPDSSAGIGKSGAQPAKKRLNFGQTGDTESVPDPQPIGEPPAAPSGVGSLTMASGGGAPVADNNEGADGVGSSSGNWHCDSQWLGDRVITTSTRTWALPTYNNHLYKQISNSTSGGSSNDNAYFGYSTPWGYFDFNRFHCHFSPRDWQRLINNNWGFRPKRLNFKLFNIQVKEVTDNNGVKTIANNLTSTVQVFTDSDYQLPYVLGSAHEGCLPPFPADVFMIPQYGYLTLNDGSQAVGRSSFYCLEYFPSQMLRTGNNFQFSYEFENVPFHSSYAHSQSLDRLMNPLIDQYLYYLSRTINGSGQNQQTLKFSVAGPSNMAVQGRNYIPGPSYRQQRVSTTVTQNNNSEFAWPGASSWALNGRNSLMNPGPAMASHKEGEDRFFPLSGSLIFGKQGTGRDNVDADKVMITNEEEIKTTNPVATESYGQVATNHQSAQYSRNSDNAQAQTGWVQNQGILPGMVWQDRDVYLQGPIWAKIPHTDGNFHPSPLMGGFGMKHPPPQILIKNTPVPADPPTAFNKDKLNSFITQYSTGQVSVEIEWELQKENSKRWNPEIQYTSNYYKSNNVEFAVNTEGVYSEPRPIGTRYLTRNL

SEQ ID NO: 42478 - protein, 743 aa, synthetic construct
MAADGYLPDWLEDNLSEGIREWWALKPGAPQPKANQQHQDNARGLVLPGYKYLGPGNGLDKGEPVNAADAAALEHDKAYDQQLKAGDNPYLKYNHADAEFQERLKEDTSFGGNLGRAVFQAKKRLLEPLGLVEEAAKTAPGKKRPVEQSPQEPDSSAGIGKSGAQPAKKRLNFGQTGDTESVPDPQPIGEPPAAPSGVGSLTMASGGGAPVADNNEGADGVGSSSGNWHCDSQWLGDRVITTSTRTWALPTYNNHLYKQISNSTSGGSSNDNAYFGYSTPWGYFDFNRFHCHFSPRDWQRLINNNWGFRPKRLNFKLFNIQVKEVTDNNGVKTIANNLTSTVQVFTDSDYQLPYVLGSAHEGCLPPFPADVFMIPQYGYLTLNDGSQAVGRSSFYCLEYFPSQMLRTGNNFQFSYEFENVPFHSSYAHSQSLDRLMNPLIDQYLYYLSRTINGSGQNQQTLKFSVAGPSNMAVQGRNYIPGPSYRQQRVSTTVTQNNNSEFAWPGASSWALNGRNSLMNPGPAMASHKEGEDRFFPLSGSLIFGKQGTGRDNVDADKVMITNEEEIKTTNPVATESYGQVATNHQSAQLHRLGPNAQAQTGWVQNQGILPGMVWQDRDVYLQGPIWAKIPHTDGNFHPSPLMGGFGMKHPPPQILIKNTPVPADPPTAFNKDKLNSFITQYSTGQVSVEIEWELQKENSKRWNPEIQYTSNYYKSNNVEFAVNTEGVYSEPRPIGTRYLTRNL

SEQ ID NO: 42479 - protein, 743 aa, synthetic construct
MAADGYLPDWLEDNLSEGIREWWALKPGAPQPKANQQHQDNARGLVLPGYKYLGPGNGLDKGEPVNAADAAALEHDKAYDQQLKAGDNPYLKYNHADAEFQERLKEDTSFGGNLGRAVFQAKKRLLEPLGLVEEAAKTAPGKKRPVEQSPQEPDSSAGIGKSGAQPAKKRLNFGQTGDTESVPDPQPIGEPPAAPSGVGSLTMASGGGAPVADNNEGADGVGSSSGNWHCDSQWLGDRVITTSTRTWALPTYNNHLYKQISNSTSGGSSNDNAYFGYSTPWGYFDFNRFHCHFSPRDWQRLINNNWGFRPKRLNFKLFNIQVKEVTDNNGVKTIANNLTSTVQVFTDSDYQLPYVLGSAHEGCLPPFPADVFMIPQYGYLTLNDGSQAVGRSSFYCLEYFPSQMLRTGNNFQFSYEFENVPFHSSYAHSQSLDRLMNPLIDQYLYYLSRTINGSGQNQQTLKFSVAGPSNMAVQGRNYIPGPSYRQQRVSTTVTQNNNSEFAWPGASSWALNGRNSLMNPGPAMASHKEGEDRFFPLSGSLIFGKQGTGRDNVDADKVMITNEEEIKTTNPVATESYGQVATNHQSAQLCKPCLTAQAQTGWVQNQGILPGMVWQDRDVYLQGPIWAKIPHTDGNFHPSPLMGGFGMKHPPPQILIKNTPVPADPPTAFNKDKLNSFITQYSTGQVSVEIEWELQKENSKRWNPEIQYTSNYYKSNNVEFAVNTEGVYSEPRPIGTRYLTRNL

SEQ ID NO: 42480 - protein, 743 aa, synthetic construct
MAADGYLPDWLEDNLSEGIREWWALKPGAPQPKANQQHQDNARGLVLPGYKYLGPGNGLDKGEPVNAADAAALEHDKAYDQQLKAGDNPYLKYNHADAEFQERLKEDTSFGGNLGRAVFQAKKRLLEPLGLVEEAAKTAPGKKRPVEQSPQEPDSSAGIGKSGAQPAKKRLNFGQTGDTESVPDPQPIGEPPAAPSGVGSLTMASGGGAPVADNNEGADGVGSSSGNWHCDSQWLGDRVITTSTRTWALPTYNNHLYKQISNSTSGGSSNDNAYFGYSTPWGYFDFNRFHCHFSPRDWQRLINNNWGFRPKRLNFKLFNIQVKEVTDNNGVKTIANNLTSTVQVFTDSDYQLPYVLGSAHEGCLPPFPADVFMIPQYGYLTLNDGSQAVGRSSFYCLEYFPSQMLRTGNNFQFSYEFENVPFHSSYAHSQSLDRLMNPLIDQYLYYLSRTINGSGQNQQTLKFSVAGPSNMAVQGRNYIPGPSYRQQRVSTTVTQNNNSEFAWPGASSWALNGRNSLMNPGPAMASHKEGEDRFFPLSGSLIFGKQGTGRDNVDADKVMITNEEEIKTTNPVATESYGQVATNHQSAQFVSTNGVAQAQTGWVQNQGILPGMVWQDRDVYLQGPIWAKIPHTDGNFHPSPLMGGFGMKHPPPQILIKNTPVPADPPTAFNKDKLNSFITQYSTGQVSVEIEWELQKENSKRWNPEIQYTSNYYKSNNVEFAVNTEGVYSEPRPIGTRYLTRNL

SEQ ID NO: 42481 - protein, 743 aa, synthetic construct
MAADGYLPDWLEDNLSEGIREWWALKPGAPQPKANQQHQDNARGLVLPGYKYLGPGNGLDKGEPVNAADAAALEHDKAYDQQLKAGDNPYLKYNHADAEFQERLKEDTSFGGNLGRAVFQAKKRLLEPLGLVEEAAKTAPGKKRPVEQSPQEPDSSAGIGKSGAQPAKKRLNFGQTGDTESVPDPQPIGEPPAAPSGVGSLTMASGGGAPVADNNEGADGVGSSSGNWHCDSQWLGDRVITTSTRTWALPTYNNHLYKQISNSTSGGSSNDNAYFGYSTPWGYFDFNRFHCHFSPRDWQRLINNNWGFRPKRLNFKLFNIQVKEVTDNNGVKTIANNLTSTVQVFTDSDYQLPYVLGSAHEGCLPPFPADVFMIPQYGYLTLNDGSQAVGRSSFYCLEYFPSQMLRTGNNFQFSYEFENVPFHSSYAHSQSLDRLMNPLIDQYLYYLSRTINGSGQNQQTLKFSVAGPSNMAVQGRNYIPGPSYRQQRVSTTVTQNNNSEFAWPGASSWALNGRNSLMNPGPAMASHKEGEDRFFPLSGSLIFGKQGTGRDNVDADKVMITNEEEIKTTNPVATESYGQVATNHQSAQFRSTNGVAQAQTGWVQNQGILPGMVWQDRDVYLQGPIWAKIPHTDGNFHPSPLMGGFGMKHPPPQILIKNTPVPADPPTAFNKDKLNSFITQYSTGQVSVEIEWELQKENSKRWNPEIQYTSNYYKSNNVEFAVNTEGVYSEPRPIGTRYLTRNL

SEQ ID NO: 42482 - protein, 743 aa, synthetic construct
MAADGYLPDWLEDNLSEGIREWWALKPGAPQPKANQQHQDNARGLVLPGYKYLGPGNGLDKGEPVNAADAAALEHDKAYDQQLKAGDNPYLKYNHADAEFQERLKEDTSFGGNLGRAVFQAKKRLLEPLGLVEEAAKTAPGKKRPVEQSPQEPDSSAGIGKSGAQPAKKRLNFGQTGDTESVPDPQPIGEPPAAPSGVGSLTMASGGGAPVADNNEGADGVGSSSGNWHCDSQWLGDRVITTSTRTWALPTYNNHLYKQISNSTSGGSSNDNAYFGYSTPWGYFDFNRFHCHFSPRDWQRLINNNWGFRPKRLNFKLFNIQVKEVTDNNGVKTIANNLTSTVQVFTDSDYQLPYVLGSAHEGCLPPFPADVFMIPQYGYLTLNDGSQAVGRSSFYCLEYFPSQMLRTGNNFQFSYEFENVPFHSSYAHSQSLDRLMNPLIDQYLYYLSRTINGSGQNQQTLKFSVAGPSNMAVQGRNYIPGPSYRQQRVSTTVTQNNNSEFAWPGASSWALNGRNSLMNPGPAMASHKEGEDRFFPLSGSLIFGKQGTGRDNVDADKVMITNEEEIKTTNPVATESYGQVATNHQSAQVESTNGRAQAQTGWVQNQGILPGMVWQDRDVYLQGPIWAKIPHTDGNFHPSPLMGGFGMKHPPPQILIKNTPVPADPPTAFNKDKLNSFITQYSTGQVSVEIEWELQKENSKRWNPEIQYTSNYYKSNNVEFAVNTEGVYSEPRPIGTRYLTRNL

SEQ ID NO: 42483 - protein, 744 aa, synthetic construct
MAADGYLPDWLEDNLSEGIREWWDLKPGAPKPKANQQKQDNGRGLVLPGYKYLGPFNGLDKGEPVNAADAAALEHDKAYDQQLKAGDNPYLRYNHADAEFQERLQEDTSFGGNLGRAVFQAKKRVLEPLGLVEEGAKTAPAKKRPVEPSPQRSPDSSTGIGKKGQQPARKRLNFGQTGDSESVPDPQPLGEPPAAPSSVGSGTVAAGGGAPMADNNEGADGVGNASGNWHCDSTWLGDRVITTSTRTWALPTYNNHLYKQISSETAGSTNDNTYFGYSTPWGYFDFNRFHCHFSPRDWQRLINNNWGFRPKKLRFKLFNIQVKEVTTNDGVTTIANNLTSTIQVFSDSEYQLPYVLGSAHQGCLPPFPADVFMIPQYGYLTLNNGSQSVGRSSFYCLEYFPSQMLRTGNNFEFSYSFEDVPFHSSYAHSQSLDRLMNPLIDQYLYYLARTQSNPGGTAGNRELQFYQGGPSTMAEQAKNWLPGPCFRQQRVSKTLDQNNNSNFAWTGATKYHLNGRNSLVNPGVAMATHKDDEDRFFPSSGVLIFGKTGATNKTTLENVLMTNEEEIRPTNPVATEEYGIVSSNLQAANYSRIGPNTAAQTQVVNNQGALPGMVWQNRDVYLQGPIWAKIPHTDGNFHPSPLMGGFGLKHPPPQILIKNTPVPANPPEVFTPAKFASFITQYSTGQVSVEIEWELQKENSKRWNPEIQYTSNFEKQTGVDFAVDSQGVYSEPRPIGTRYLTRNL

SEQ ID NO: 42484 - protein, 744 aa, synthetic construct
MAADGYLPDWLEDNLSEGIREWWDLKPGAPKPKANQQKQDNGRGLVLPGYKYLGPFNGLDKGEPVNAADAAALEHDKAYDQQLKAGDNPYLRYNHADAEFQERLQEDTSFGGNLGRAVFQAKKRVLEPLGLVEEGAKTAPAKKRPVEPSPQRSPDSSTGIGKKGQQPARKRLNFGQTGDSESVPDPQPLGEPPAAPSSVGSGTVAAGGGAPMADNNEGADGVGNASGNWHCDSTWLGDRVITTSTRTWALPTYNNHLYKQISSETAGSTNDNTYFGYSTPWGYFDFNRFHCHFSPRDWQRLINNNWGFRPKKLRFKLFNIQVKEVTTNDGVTTIANNLTSTIQVFSDSEYQLPYVLGSAHQGCLPPFPADVFMIPQYGYLTLNNGSQSVGRSSFYCLEYFPSQMLRTGNNFEFSYSFEDVPFHSSYAHSQSLDRLMNPLIDQYLYYLARTQSNPGGTAGNRELQFYQGGPSTMAEQAKNWLPGPCFRQQRVSKTLDQNNNSNFAWTGATKYHLNGRNSLVNPGVAMATHKDDEDRFFPSSGVLIFGKTGATNKTTLENVLMTNEEEIRPTNPVATEEYGIVSSNLQSAQYSRIGPNAQAQTQVVNNQGALPGMVWQNRDVYLQGPIWAKIPHTDGNFHPSPLMGGFGLKHPPPQILIKNTPVPANPPEVFTPAKFASFITQYSTGQVSVEIEWELQKENSKRWNPEIQYTSNFEKQTGVDFAVDSQGVYSEPRPIGTRYLTRNL

SEQ ID NO: 42485 - protein, 743 aa, synthetic construct
MAADGYLPDWLEDNLSEGIREWWALKPGAPQPKANQQHQDNARGLVLPGYKYLGPGNGLDKGEPVNAADAAALEHDKAYDQQLKAGDNPYLKYNHADAEFQERLKEDTSFGGNLGRAVFQAKKRLLEPLGLVEEAAKTAPGKKRPVEQSPQEPDSSAGIGKSGAQPAKKRLNFGQTGDTESVPDPQPIGEPPAAPSGVGSLTMASGGGAPVADNNEGADGVGSSSGNWHCDSQWLGDRVITTSTRTWALPTYNNHLYKQISNSTSGGSSNDNAYFGYSTPWGYFDFNRFHCHFSPRDWQRLINNNWGFRPKRLNFKLFNIQVKEVTDNNGVKTIANNLTSTVQVFTDSDYQLPYVLGSAHEGCLPPFPADVFMIPQYGYLTLNDGSQAVGRSSFYCLEYFPSQMLRTGNNFQFSYEFENVPFHSSYAHSQSLDRLMNPLIDQYLYYLSRTINGSGQNQQTLKFSVAGPSNMAVQGRNYIPGPSYRQQRVSTTVTQNNNSEFAWPGASSWALNGRNSLMNPGPAMASHKEGEDRFFPLSGSLIFGKQGTGRDNVDADKVMITNEEEIKTTNPVATESYGQVATNHQEAQYSRIGPNNQAQTGWVQNQGILPGMVWQDRDVYLQGPIWAKIPHTDGNFHPSPLMGGFGMKHPPPQILIKNTPVPADPPTAFNKDKLNSFITQYSTGQVSVEIEWELQKENSKRWNPEIQYTSNYYKSNNVEFAVNTEGVYSEPRPIGTRYLTRNL

SEQ ID NO: 42486 - protein, 743 aa, synthetic construct
MAADGYLPDWLEDNLSEGIREWWALKPGAPQPKANQQHQDNARGLVLPGYKYLGPGNGLDKGEPVNAADAAALEHDKAYDQQLKAGDNPYLKYNHADAEFQERLKEDTSFGGNLGRAVFQAKKRLLEPLGLVEEAAKTAPGKKRPVEQSPQEPDSSAGIGKSGAQPAKKRLNFGQTGDTESVPDPQPIGEPPAAPSGVGSLTMASGGGAPVADNNEGADGVGSSSGNWHCDSQWLGDRVITTSTRTWALPTYNNHLYKQISNSTSGGSSNDNAYFGYSTPWGYFDFNRFHCHFSPRDWQRLINNNWGFRPKRLNFKLFNIQVKEVTDNNGVKTIANNLTSTVQVFTDSDYQLPYVLGSAHEGCLPPFPADVFMIPQYGYLTLNDGSQAVGRSSFYCLEYFPSQMLRTGNNFQFSYEFENVPFHSSYAHSQSLDRLMNPLIDQYLYYLSRTINGSGQNQQTLKFSVAGPSNMAVQGRNYIPGPSYRQQRVSTTVTQNNNSEFAWPGASSWALNGRNSLMNPGPAMASHKEGEDRFFPLSGSLIFGKQGTGRDNVDADKVMITNEEEIKTTNPVATESYGQVATNHQSADFRSTNGVAQAETGWVQNQGILPGMVWQDRDVYLQGPIWAKIPHTDGNFHPSPLMGGFGMKHPPPQILIKNTPVPADPPTAFNKDKLNSFITQYSTGQVSVEIEWELQKENSKRWNPEIQYTSNYYKSNNVEFAVNTEGVYSEPRPIGTRYLTRNL

SEQ ID NO: 42487 - protein, 7 aa, synthetic construct
YSRIGPN

SEQ ID NO: 42488 - protein, 7 aa, synthetic construct
YSRNSDN

SEQ ID NO: 42489 - protein, 7 aa, synthetic construct
LHRLGPN

SEQ ID NO: 42490 - protein, 7 aa, synthetic construct
LCKPCLT

SEQ ID NO: 42491 - protein, 7 aa, synthetic construct
FVSTNGV

SEQ ID NO: 42492 - protein, 7 aa, synthetic construct
FRSTNGV

SEQ ID NO: 42493 - protein, 7 aa, synthetic construct
VESTNGR

SEQ ID NO: 42494 - protein, 7 aa, synthetic construct
SAQAQAQ

SEQ ID NO: 42495 - protein, 14 aa, synthetic construct
SAQTLAVPFKAQAQ

SEQ ID NO: 42496 - protein, 14 aa, synthetic construct
SDGTLAVPFKAQAQ

SEQ ID NO: 42497 - protein, 14 aa, synthetic construct
SAQKSVGSVYAQAQ

SEQ ID NO: 42498 - protein, 14 aa, synthetic construct
SAQYSRIGPNAQAQ

SEQ ID NO: 42499 - protein, 14 aa, synthetic construct
SAQYSRNSDNAQAQ

SEQ ID NO: 42500 - protein, 14 aa, synthetic construct
SAQLHRLGPNAQAQ

SEQ ID NO: 42501 - protein, 14 aa, synthetic construct
SAQLCKPCLTAQAQ

SEQ ID NO: 42502 - protein, 14 aa, synthetic construct
SAQFVSTNGVAQAQ

SEQ ID NO: 42503 - protein, 14 aa, synthetic construct
SAQFRSTNGVAQAQ

SEQ ID NO: 42504 - protein, 14 aa, synthetic construct
SAQVESTNGRAQAQ

SEQ ID NO: 42505 - protein, 14 aa, synthetic construct
  REGION 11..14: note = misc_feature - Xaa can be any naturally occurring amino acid
  REGION 1..3: note = misc_feature - Xaa can be any naturally occurring amino acid
XXXYSRIGPNXXXX

SEQ ID NO: 42506 - protein, 14 aa, synthetic construct
  REGION 1..3: note = misc_feature - Xaa can be any naturally occurring amino acid
  REGION 11..14: note = misc_feature - Xaa can be any naturally occurring amino acid
XXXYSRNSDNXXXX

SEQ ID NO: 42507 - protein, 14 aa, synthetic construct
  REGION 11..14: note = misc_feature - Xaa can be any naturally occurring amino acid
  REGION 1..3: note = misc_feature - Xaa can be any naturally occurring amino acid
XXXLHRLGPNXXXX

SEQ ID NO: 42508 - protein, 14 aa, synthetic construct
  REGION 11..14: note = misc_feature - Xaa can be any naturally occurring amino acid
  REGION 1..3: note = misc_feature - Xaa can be any naturally occurring amino acid
XXXFRSTNGVXXXX

SEQ ID NO: 42509 - protein, 14 aa, synthetic construct
  REGION 1..3: note = misc_feature - Xaa can be any naturally occurring amino acid
  REGION 11..14: note = misc_feature - Xaa can be any naturally occurring amino acid
XXXFVSTNGVXXXX

SEQ ID NO: 42510 - protein, 14 aa, synthetic construct
  REGION 11..14: note = misc_feature - Xaa can be any naturally occurring amino acid
  REGION 1..3: note = misc_feature - Xaa can be any naturally occurring amino acid
XXXFZSTNGZXXXX

SEQ ID NO: 42511 - protein, 14 aa, synthetic construct
  REGION 11..14: note = misc_feature - Xaa can be any naturally occurring amino acid
  REGION 1..3: note = misc_feature - Xaa can be any naturally occurring amino acid
XXXFRSTNGZXXXX

SEQ ID NO: 42512 - protein, 14 aa, synthetic construct
  REGION 11..14: note = misc_feature - Xaa can be any naturally occurring amino acid
  REGION 1..3: note = misc_feature - Xaa can be any naturally occurring amino acid
XXXVESTNGRXXXX

SEQ ID NO: 42513 - protein, 14 aa, synthetic construct
AAQYSRIGPNAAAQ

SEQ ID NO: 42514 - protein, 14 aa, synthetic construct
AAQYSRIGPNAEAQ

SEQ ID NO: 42515 - protein, 14 aa, synthetic construct
AAQYSRIGPNAMAQ

SEQ ID NO: 42516 - protein, 14 aa, synthetic construct
AAQYSRIGPNANAQ

SEQ ID NO: 42517 - protein, 14 aa, synthetic construct
AAQYSRIGPNAPAQ

SEQ ID NO: 42518 - protein, 14 aa, synthetic construct
AAQYSRIGPNAQAA

SEQ ID NO: 42519 - protein, 14 aa, synthetic construct
AAQYSRIGPNAQAE

SEQ ID NO: 42520 - protein, 14 aa, synthetic construct
AAQYSRIGPNAQAG

SEQ ID NO: 42521 - protein, 14 aa, synthetic construct
AAQYSRIGPNAQAL

SEQ ID NO: 42522 - protein, 14 aa, synthetic construct
AAQYSRIGPNAQAM

SEQ ID NO: 42523 - protein, 14 aa, synthetic construct
AAQYSRIGPNAQAN

SEQ ID NO: 42524 - protein, 14 aa, synthetic construct
AAQYSRIGPNAQAQ

SEQ ID NO: 42525 - protein, 14 aa, synthetic construct
AAQYSRIGPNAQAS

SEQ ID NO: 42526 - protein, 14 aa, synthetic construct
AAQYSRIGPNAQAT

SEQ ID NO: 42527 - protein, 14 aa, synthetic construct
AAQYSRIGPNAQAV

SEQ ID NO: 42528 - protein, 14 aa, synthetic construct
AAQYSRIGPNAQCQ

SEQ ID NO: 42529 - protein, 14 aa, synthetic construct
AAQYSRIGPNAQGQ

SEQ ID NO: 42530 - protein, 14 aa, synthetic construct
AAQYSRIGPNAQPQ

SEQ ID NO: 42531 - protein, 14 aa, synthetic construct
AAQYSRIGPNAQSQ

SEQ ID NO: 42532 - protein, 14 aa, synthetic construct
AAQYSRIGPNAQTQ

SEQ ID NO: 42533 - protein, 14 aa, synthetic construct
AAQYSRIGPNAQVQ

SEQ ID NO: 42534 - protein, 14 aa, synthetic construct
AAQYSRIGPNASAQ

SEQ ID NO: 42535 - protein, 14 aa, synthetic construct
AAQYSRIGPNATAE

SEQ ID NO: 42536 - protein, 14 aa, synthetic construct
AAQYSRIGPNATAQ

SEQ ID NO: 42537 - protein, 14 aa, synthetic construct
AAQYSRIGPNATPE

SEQ ID NO: 42538 - protein, 14 aa, synthetic construct
AAQYSRIGPNATSE

SEQ ID NO: 42539 - protein, 14 aa, synthetic construct
AAQYSRIGPNATTE

SEQ ID NO: 42540 - protein, 14 aa, synthetic construct
AAQYSRIGPNATVE

SEQ ID NO: 42541 - protein, 14 aa, synthetic construct
AAQYSRIGPNDQAQ

SEQ ID NO: 42542 - protein, 14 aa, synthetic construct
AAQYSRIGPNEQAQ

SEQ ID NO: 42543 - protein, 14 aa, synthetic construct
AAQYSRIGPNHQAQ

SEQ ID NO: 42544 - protein, 14 aa, synthetic construct
AAQYSRIGPNHTAE

SEQ ID NO: 42545 - protein, 14 aa, synthetic construct
AAQYSRIGPNIQAQ

SEQ ID NO: 42546 - protein, 14 aa, synthetic construct
AAQYSRIGPNITAE

SEQ ID NO: 42547 - protein, 14 aa, synthetic construct
AAQYSRIGPNNEAA

SEQ ID NO: 42548 - protein, 14 aa, synthetic construct
AAQYSRIGPNNQAQ

SEQ ID NO: 42549 - protein, 14 aa, synthetic construct
AAQYSRIGPNNTAE

SEQ ID NO: 42550 - protein, 14 aa, synthetic construct
AAQYSRIGPNPAAE

SEQ ID NO: 42551 - protein, 14 aa, synthetic construct
AAQYSRIGPNPHAE

SEQ ID NO: 42552 - protein, 14 aa, synthetic construct
AAQYSRIGPNPMAE

SEQ ID NO: 42553 - protein, 14 aa, synthetic construct
AAQYSRIGPNPQAE

SEQ ID NO: 42554 - protein, 14 aa, synthetic construct
AAQYSRIGPNPQAQ

SEQ ID NO: 42555 - protein, 14 aa, synthetic construct
AAQYSRIGPNPQPE

SEQ ID NO: 42556 - protein, 14 aa, synthetic construct
AAQYSRIGPNPQVE

SEQ ID NO: 42557 - protein, 14 aa, synthetic construct
AAQYSRIGPNPSAE

SEQ ID NO: 42558 - protein, 14 aa, synthetic construct
AAQYSRIGPNPTAE

SEQ ID NO: 42559 - protein, 14 aa, synthetic construct
AAQYSRIGPNQQAQ

SEQ ID NO: 42560 - protein, 14 aa, synthetic construct
AAQYSRIGPNSQAQ

SEQ ID NO: 42561 - protein, 14 aa, synthetic construct
AAQYSRIGPNSTAE

SEQ ID NO: 42562 - protein, 14 aa, synthetic construct
AAQYSRIGPNYQAQ

SEQ ID NO: 42563 - protein, 14 aa, synthetic construct
AFQYSRIGPNAQAQ

SEQ ID NO: 42564 - protein, 14 aa, synthetic construct
AMQYSRIGPNAQAQ

SEQ ID NO: 42565 - protein, 14 aa, synthetic construct
APQYSRIGPNAQAQ

SEQ ID NO: 42566 - protein, 14 aa, synthetic construct
APQYSRIGPNATAE

SEQ ID NO: 42567 - protein, 14 aa, synthetic construct
APQYSRIGPNPQAE

SEQ ID NO: 42568 - protein, 14 aa, synthetic construct
ATQYSRIGPNPQAE

SEQ ID NO: 42569 - protein, 14 aa, synthetic construct
AVQYSRIGPNAQAQ

SEQ ID NO: 42570 - protein, 14 aa, synthetic construct
AYQYSRIGPNAQAQ

SEQ ID NO: 42571 - protein, 14 aa, synthetic construct
CAQYSRIGPNATAQ

SEQ ID NO: 42572 - protein, 14 aa, synthetic construct
CAQYSRIGPNIQAQ

SEQ ID NO: 42573 - protein, 14 aa, synthetic construct
CAQYSRIGPNPQAQ

SEQ ID NO: 42574 - protein, 14 aa, synthetic construct
DRQYSRIGPNPQAE

SEQ ID NO: 42575 - protein, 14 aa, synthetic construct
EAQYSRIGPNAIAQ

SEQ ID NO: 42576 - protein, 14 aa, synthetic construct
EAQYSRIGPNAMAQ

SEQ ID NO: 42577 - protein, 14 aa, synthetic construct
EAQYSRIGPNAPAQ

SEQ ID NO: 42578 - protein, 14 aa, synthetic construct
EAQYSRIGPNAQAA

SEQ ID NO: 42579 - protein, 14 aa, synthetic construct
EAQYSRIGPNAQAG

SEQ ID NO: 42580 - protein, 14 aa, synthetic construct
EAQYSRIGPNAQAI

SEQ ID NO: 42581 - protein, 14 aa, synthetic construct
EAQYSRIGPNAQAL

SEQ ID NO: 42582 - protein, 14 aa, synthetic construct
EAQYSRIGPNAQAM

SEQ ID NO: 42583 - protein, 14 aa, synthetic construct
EAQYSRIGPNAQAN

SEQ ID NO: 42584 - protein, 14 aa, synthetic construct
EAQYSRIGPNAQAQ

SEQ ID NO: 42585 - protein, 14 aa, synthetic construct
EAQYSRIGPNAQAR

SEQ ID NO: 42586 - protein, 14 aa, synthetic construct
EAQYSRIGPNAQAS

SEQ ID NO: 42587 - protein, 14 aa, synthetic construct
EAQYSRIGPNAQAT

SEQ ID NO: 42588 - protein, 14 aa, synthetic construct
EAQYSRIGPNAQAV

SEQ ID NO: 42589 - protein, 14 aa, synthetic construct
EAQYSRIGPNAQCQ

SEQ ID NO: 42590 - protein, 14 aa, synthetic construct
EAQYSRIGPNAQPQ

SEQ ID NO: 42591 - protein, 14 aa, synthetic construct
EAQYSRIGPNAQSQ

SEQ ID NO: 42592 - protein, 14 aa, synthetic construct
EAQYSRIGPNAQTQ

SEQ ID NO: 42593 - protein, 14 aa, synthetic construct
EAQYSRIGPNAQVQ

SEQ ID NO: 42594 - protein, 14 aa, synthetic construct
EAQYSRIGPNATAQ

SEQ ID NO: 42595 - protein, 14 aa, synthetic construct
EAQYSRIGPNEQAQ

SEQ ID NO: 42596 - protein, 14 aa, synthetic construct
EAQYSRIGPNHQAQ

SEQ ID NO: 42597 - protein, 14 aa, synthetic construct
EAQYSRIGPNHTAE

SEQ ID NO: 42598 - protein, 14 aa, synthetic construct
EAQYSRIGPNIQAQ

SEQ ID NO: 42599 - protein, 14 aa, synthetic construct
EAQYSRIGPNKQAQ

SEQ ID NO: 42600 - protein, 14 aa, synthetic construct
EAQYSRIGPNKTAE

SEQ ID NO: 42601 - protein, 14 aa, synthetic construct
EAQYSRIGPNNAAM

SEQ ID NO: 42602 - protein, 14 aa, synthetic construct
EAQYSRIGPNNAAQ

SEQ ID NO: 42603 - protein, 14 aa, synthetic construct
EAQYSRIGPNNAAT

SEQ ID NO: 42604 - protein, 14 aa, synthetic construct
EAQYSRIGPNNHAE

SEQ ID NO: 42605 - protein, 14 aa, synthetic construct
EAQYSRIGPNNIAE

SEQ ID NO: 42606 - protein, 14 aa, synthetic construct
EAQYSRIGPNNKAE

SEQ ID NO: 42607 - protein, 14 aa, synthetic construct
EAQYSRIGPNNLAD

SEQ ID NO: 42608 - protein, 14 aa, synthetic construct
EAQYSRIGPNNLAE

SEQ ID NO: 42609 - protein, 14 aa, synthetic construct
EAQYSRIGPNNMAD

SEQ ID NO: 42610 - protein, 14 aa, synthetic construct
EAQYSRIGPNNMAE

SEQ ID NO: 42611 - protein, 14 aa, synthetic construct
EAQYSRIGPNNMAQ

SEQ ID NO: 42612 - protein, 14 aa, synthetic construct
EAQYSRIGPNNNAT

SEQ ID NO: 42613 - protein, 14 aa, synthetic construct
EAQYSRIGPNNPAD

SEQ ID NO: 42614 - protein, 14 aa, synthetic construct
EAQYSRIGPNNPAE

SEQ ID NO: 42615 - protein, 14 aa, synthetic construct
EAQYSRIGPNNPAQ

SEQ ID NO: 42616 - protein, 14 aa, synthetic construct
EAQYSRIGPNNPPQ

SEQ ID NO: 42617 - protein, 14 aa, synthetic construct
EAQYSRIGPNNQAA

SEQ ID NO: 42618 - protein, 14 aa, synthetic construct
EAQYSRIGPNNQAD

SEQ ID NO: 42619 - protein, 14 aa, synthetic construct
EAQYSRIGPNNQAE

SEQ ID NO: 42620 - protein, 14 aa, synthetic construct
EAQYSRIGPNNQAL

SEQ ID NO: 42621 - protein, 14 aa, synthetic construct
EAQYSRIGPNNQAM

SEQ ID NO: 42622 - protein, 14 aa, synthetic construct
EAQYSRIGPNNQAN

SEQ ID NO: 42623 - protein, 14 aa, synthetic construct
EAQYSRIGPNNQAQ

SEQ ID NO: 42624 - protein, 14 aa, synthetic construct
EAQYSRIGPNNQAS

SEQ ID NO: 42625 - protein, 14 aa, synthetic construct
EAQYSRIGPNNQAT

SEQ ID NO: 42626 - protein, 14 aa, synthetic construct
EAQYSRIGPNNQGE

SEQ ID NO: 42627 - protein, 14 aa, synthetic construct
EAQYSRIGPNNQPD

SEQ ID NO: 42628 - protein, 14 aa, synthetic construct
EAQYSRIGPNNQPE

SEQ ID NO: 42629 - protein, 14 aa, synthetic construct
EAQYSRIGPNNQPN

SEQ ID NO: 42630 - protein, 14 aa, synthetic construct
EAQYSRIGPNNQPQ

SEQ ID NO: 42631 - protein, 14 aa, synthetic construct
EAQYSRIGPNNQPS

SEQ ID NO: 42632 - protein, 14 aa, synthetic construct
EAQYSRIGPNNQPT

SEQ ID NO: 42633 - protein, 14 aa, synthetic construct
EAQYSRIGPNNQSE

SEQ ID NO: 42634 - protein, 14 aa, synthetic construct
EAQYSRIGPNNQTE

SEQ ID NO: 42635 - protein, 14 aa, synthetic construct
EAQYSRIGPNNQVE

SEQ ID NO: 42636 - protein, 14 aa, synthetic construct
EAQYSRIGPNNSAM

SEQ ID NO: 42637 - protein, 14 aa, synthetic construct
EAQYSRIGPNNSAQ

SEQ ID NO: 42638 - protein, 14 aa, synthetic construct
EAQYSRIGPNNSAS

SEQ ID NO: 42639 - protein, 14 aa, synthetic construct
EAQYSRIGPNNSAT

SEQ ID NO: 42640 - protein, 14 aa, synthetic construct
EAQYSRIGPNNSPQ

SEQ ID NO: 42641 - protein, 14 aa, synthetic construct
EAQYSRIGPNNTAA

SEQ ID NO: 42642 - protein, 14 aa, synthetic construct
EAQYSRIGPNNTAD

SEQ ID NO: 42643 - protein, 14 aa, synthetic construct
EAQYSRIGPNNTAE

SEQ ID NO: 42644 - protein, 14 aa, synthetic construct
EAQYSRIGPNNTAM

SEQ ID NO: 42645 - protein, 14 aa, synthetic construct
EAQYSRIGPNNTAQ

SEQ ID NO: 42646 - protein, 14 aa, synthetic construct
EAQYSRIGPNNTAS

SEQ ID NO: 42647 - protein, 14 aa, synthetic construct
EAQYSRIGPNNTAT

SEQ ID NO: 42648 - protein, 14 aa, synthetic construct
EAQYSRIGPNNTPQ

SEQ ID NO: 42649 - protein, 14 aa, synthetic construct
EAQYSRIGPNNVAE

SEQ ID NO: 42650 - protein, 14 aa, synthetic construct
EAQYSRIGPNNVAQ

SEQ ID NO: 42651 - protein, 14 aa, synthetic construct
EAQYSRIGPNPQAQ

SEQ ID NO: 42652 - protein, 14 aa, synthetic construct
EAQYSRIGPNQQAQ

SEQ ID NO: 42653 - protein, 14 aa, synthetic construct
EAQYSRIGPNRQAQ

SEQ ID NO: 42654 - protein, 14 aa, synthetic construct
EAQYSRIGPNRTAE

SEQ ID NO: 42655 - protein, 14 aa, synthetic construct
EAQYSRIGPNSQAQ

SEQ ID NO: 42656 - protein, 14 aa, synthetic construct
EAQYSRIGPNYQAQ

SEQ ID NO: 42657 - protein, 14 aa, synthetic construct
ECQYSRIGPNAQAQ

SEQ ID NO: 42658 - protein, 14 aa, synthetic construct
EFQYSRIGPNAQAQ

SEQ ID NO: 42659 - protein, 14 aa, synthetic construct
EFQYSRIGPNATAE

SEQ ID NO: 42660 - protein, 14 aa, synthetic construct
EIQYSRIGPNAQAQ

SEQ ID NO: 42661 - protein, 14 aa, synthetic construct
EIQYSRIGPNATAE

SEQ ID NO: 42662 - protein, 14 aa, synthetic construct
EIQYSRIGPNNQAE

SEQ ID NO: 42663 - protein, 14 aa, synthetic construct
EMQYSRIGPNAQAQ

SEQ ID NO: 42664 - protein, 14 aa, synthetic construct
EMQYSRIGPNNQAE

SEQ ID NO: 42665 - protein, 14 aa, synthetic construct
EPQYSRIGPNAQAQ

SEQ ID NO: 42666 - protein, 14 aa, synthetic construct
EPQYSRIGPNNQAE

SEQ ID NO: 42667 - protein, 14 aa, synthetic construct
EQQYSRIGPNNQAE

SEQ ID NO: 42668 - protein, 14 aa, synthetic construct
EQQYSRIGPNNTAQ

SEQ ID NO: 42669 - protein, 14 aa, synthetic construct
ETQYSRIGPNAQAQ

SEQ ID NO: 42670 - protein, 14 aa, synthetic construct
ETQYSRIGPNNQAD

SEQ ID NO: 42671 - protein, 14 aa, synthetic construct
ETQYSRIGPNNQAE

SEQ ID NO: 42672 - protein, 14 aa, synthetic construct
ETQYSRIGPNNQAN

SEQ ID NO: 42673 - protein, 14 aa, synthetic construct
ETQYSRIGPNNQAQ

SEQ ID NO: 42674 - protein, 14 aa, synthetic construct
ETQYSRIGPNNQAS

SEQ ID NO: 42675 - protein, 14 aa, synthetic construct
ETQYSRIGPNNQAT

SEQ ID NO: 42676 - protein, 14 aa, synthetic construct
ETQYSRIGPNNTAQ

SEQ ID NO: 42677 - protein, 14 aa, synthetic construct
EVQYSRIGPNAQAQ

SEQ ID NO: 42678 - protein, 14 aa, synthetic construct
EVQYSRIGPNNQAE

SEQ ID NO: 42679 - protein, 14 aa, synthetic construct
FAQYSRIGPNNQAQ

SEQ ID NO: 42680 - protein, 14 aa, synthetic construct
GAQYSRIGPNATAQ

SEQ ID NO: 42681 - protein, 14 aa, synthetic construct
GAQYSRIGPNHTAE

SEQ ID NO: 42682 - protein, 14 aa, synthetic construct
GAQYSRIGPNNQAQ

SEQ ID NO: 42683 - protein, 14 aa, synthetic construct
GAQYSRIGPNNTAE

SEQ ID NO: 42684 - protein, 14 aa, synthetic construct
GAQYSRIGPNPAAE

SEQ ID NO: 42685 - protein, 14 aa, synthetic construct
GAQYSRIGPNPEAE

SEQ ID NO: 42686 - protein, 14 aa, synthetic construct
GAQYSRIGPNPHAE

SEQ ID NO: 42687 - protein, 14 aa, synthetic construct
GAQYSRIGPNPIAE

SEQ ID NO: 42688 - protein, 14 aa, synthetic construct
GAQYSRIGPNPLAE

SEQ ID NO: 42689 - protein, 14 aa, synthetic construct
GAQYSRIGPNPMAE

SEQ ID NO: 42690 - protein, 14 aa, synthetic construct
GAQYSRIGPNPNAE

SEQ ID NO: 42691 - protein, 14 aa, synthetic construct
GAQYSRIGPNPQAE

SEQ ID NO: 42692 - protein, 14 aa, synthetic construct
GAQYSRIGPNPQAQ

SEQ ID NO: 42693 - protein, 14 aa, synthetic construct
GAQYSRIGPNPQFE

SEQ ID NO: 42694 - protein, 14 aa, synthetic construct
GAQYSRIGPNPQGE

SEQ ID NO: 42695 - protein, 14 aa, synthetic construct
GAQYSRIGPNPQHE

SEQ ID NO: 42696 - protein, 14 aa, synthetic construct
GAQYSRIGPNPQPE

SEQ ID NO: 42697 - protein, 14 aa, synthetic construct
GAQYSRIGPNPQQE

SEQ ID NO: 42698 - protein, 14 aa, synthetic construct
GAQYSRIGPNPQSE

SEQ ID NO: 42699 - protein, 14 aa, synthetic construct
GAQYSRIGPNPQTE

SEQ ID NO: 42700 - protein, 14 aa, synthetic construct
GAQYSRIGPNPQVE

SEQ ID NO: 42701 - protein, 14 aa, synthetic construct
GAQYSRIGPNPQYE

SEQ ID NO: 42702 - protein, 14 aa, synthetic construct
GAQYSRIGPNPSAE

SEQ ID NO: 42703 - protein, 14 aa, synthetic construct
GAQYSRIGPNPTAE

SEQ ID NO: 42704 - protein, 14 aa, synthetic construct
GAQYSRIGPNPVAE

SEQ ID NO: 42705 - protein, 14 aa, synthetic construct
GPQYSRIGPNPQAE

SEQ ID NO: 42706 - protein, 14 aa, synthetic construct
GVQYSRIGPNPQAE

SEQ ID NO: 42707 - protein, 14 aa, synthetic construct
HAQYSRIGPNDQAQ

SEQ ID NO: 42708 - protein, 14 aa, synthetic construct
HAQYSRIGPNPQPE

SEQ ID NO: 42709 - protein, 14 aa, synthetic construct
IAQYSRIGPNEQAQ

SEQ ID NO: 42710 - protein, 14 aa, synthetic construct
IAQYSRIGPNIQAQ

SEQ ID NO: 42711 - protein, 14 aa, synthetic construct
IAQYSRIGPNNQAQ

SEQ ID NO: 42712 - protein, 14 aa, synthetic construct
IAQYSRIGPNQQAQ

SEQ ID NO: 42713 - protein, 14 aa, synthetic construct
IAQYSRIGPNVQAQ

SEQ ID NO: 42714 - protein, 14 aa, synthetic construct
KAQYSRIGPNDQAQ

SEQ ID NO: 42715 - protein, 14 aa, synthetic construct
KAQYSRIGPNDTAE

SEQ ID NO: 42716 - protein, 14 aa, synthetic construct
KAQYSRIGPNEQAQ

SEQ ID NO: 42717 - protein, 14 aa, synthetic construct
KAQYSRIGPNETAE

SEQ ID NO: 42718 - protein, 14 aa, synthetic construct
KAQYSRIGPNPEAE

SEQ ID NO: 42719 - protein, 14 aa, synthetic construct
LAQYSRIGPNAMAQ

SEQ ID NO: 42720 - protein, 14 aa, synthetic construct
LAQYSRIGPNAPAQ

SEQ ID NO: 42721 - protein, 14 aa, synthetic construct
LAQYSRIGPNAQAT

SEQ ID NO: 42722 - protein, 14 aa, synthetic construct
LAQYSRIGPNEQAQ

SEQ ID NO: 42723 - protein, 14 aa, synthetic construct
LAQYSRIGPNIQAQ

SEQ ID NO: 42724 - protein, 14 aa, synthetic construct
LAQYSRIGPNNQAQ

SEQ ID NO: 42725 - protein, 14 aa, synthetic construct
LAQYSRIGPNPQAQ

SEQ ID NO: 42726 - protein, 14 aa, synthetic construct
LAQYSRIGPNQQAQ

SEQ ID NO: 42727 - protein, 14 aa, synthetic construct
LAQYSRIGPNVQAQ

SEQ ID NO: 42728 - protein, 14 aa, synthetic construct
LPQYSRIGPNAQAQ

SEQ ID NO: 42729 - protein, 14 aa, synthetic construct
MAQYSRIGPNAMAQ

SEQ ID NO: 42730 - protein, 14 aa, synthetic construct
MAQYSRIGPNAPAQ

SEQ ID NO: 42731 - protein, 14 aa, synthetic construct
MAQYSRIGPNAQAA

SEQ ID NO: 42732 - protein, 14 aa, synthetic construct
MAQYSRIGPNAQAS

SEQ ID NO: 42733 - protein, 14 aa, synthetic construct
MAQYSRIGPNAQAT

SEQ ID NO: 42734 - protein, 14 aa, synthetic construct
MAQYSRIGPNAQCQ

SEQ ID NO: 42735 - protein, 14 aa, synthetic construct
MAQYSRIGPNAQTQ

SEQ ID NO: 42736 - protein, 14 aa, synthetic construct
MAQYSRIGPNATAQ

SEQ ID NO: 42737 - protein, 14 aa, synthetic construct
MAQYSRIGPNATPE

SEQ ID NO: 42738 - protein, 14 aa, synthetic construct
MAQYSRIGPNEQAQ

SEQ ID NO: 42739 - protein, 14 aa, synthetic construct
MAQYSRIGPNNQAQ

SEQ ID NO: 42740 - protein, 14 aa, synthetic construct
MAQYSRIGPNNTAE

SEQ ID NO: 42741 - protein, 14 aa, synthetic construct
MAQYSRIGPNPQAQ

SEQ ID NO: 42742 - protein, 14 aa, synthetic construct
MAQYSRIGPNQQAQ

SEQ ID NO: 42743 - protein, 14 aa, synthetic construct
MPQYSRIGPNAQAQ

SEQ ID NO: 42744 - protein, 14 aa, synthetic construct
NAQYSRIGPNAMAQ

SEQ ID NO: 42745 - protein, 14 aa, synthetic construct
NAQYSRIGPNAPAQ

SEQ ID NO: 42746 - protein, 14 aa, synthetic construct
NAQYSRIGPNAQAT

SEQ ID NO: 42747 - protein, 14 aa, synthetic construct
NAQYSRIGPNATAQ

SEQ ID NO: 42748 - protein, 14 aa, synthetic construct
NAQYSRIGPNATPE

SEQ ID NO: 42749 - protein, 14 aa, synthetic construct
NAQYSRIGPNDQAQ

SEQ ID NO: 42750 - protein, 14 aa, synthetic construct
NAQYSRIGPNHTAE

SEQ ID NO: 42751 - protein, 14 aa, synthetic construct
NAQYSRIGPNIQAQ

SEQ ID NO: 42752 - protein, 14 aa, synthetic construct
NAQYSRIGPNITAE

SEQ ID NO: 42753 - protein, 14 aa, synthetic construct
NAQYSRIGPNLQAQ

SEQ ID NO: 42754 - protein, 14 aa, synthetic construct
NAQYSRIGPNLTAE

SEQ ID NO: 42755 - protein, 14 aa, synthetic construct
NAQYSRIGPNNQAQ

SEQ ID NO: 42756 - protein, 14 aa, synthetic construct
NAQYSRIGPNNTAE

SEQ ID NO: 42757 - protein, 14 aa, synthetic construct
NAQYSRIGPNPQAQ

SEQ ID NO: 42758 - protein, 14 aa, synthetic construct
NAQYSRIGPNPQPE

SEQ ID NO: 42759 - protein, 14 aa, synthetic construct
NAQYSRIGPNYQAQ

SEQ ID NO: 42760 - protein, 14 aa, synthetic construct
NFQYSRIGPNAQAQ

SEQ ID NO: 42761 - protein, 14 aa, synthetic construct
NIQYSRIGPNAQAQ

SEQ ID NO: 42762 - protein, 14 aa, synthetic construct
NMQYSRIGPNAQAQ

SEQ ID NO: 42763 - protein, 14 aa, synthetic construct
NPQYSRIGPNAQAQ

SEQ ID NO: 42764 - protein, 14 aa, synthetic construct
NVQYSRIGPNAQAQ

SEQ ID NO: 42765 - protein, 14 aa, synthetic construct
QAQYSRIGPNAEAQ

SEQ ID NO: 42766 - protein, 14 aa, synthetic construct
QAQYSRIGPNAMAQ

SEQ ID NO: 42767 - protein, 14 aa, synthetic construct
QAQYSRIGPNAPAQ

SEQ ID NO: 42768 - protein, 14 aa, synthetic construct
QAQYSRIGPNAQAA

SEQ ID NO: 42769 - protein, 14 aa, synthetic construct
QAQYSRIGPNAQAS

SEQ ID NO: 42770 - protein, 14 aa, synthetic construct
QAQYSRIGPNAQAT

SEQ ID NO: 42771 - protein, 14 aa, synthetic construct
QAQYSRIGPNAQCQ

SEQ ID NO: 42772 - protein, 14 aa, synthetic construct
QAQYSRIGPNAQPQ

SEQ ID NO: 42773 - protein, 14 aa, synthetic construct
QAQYSRIGPNAQSQ

SEQ ID NO: 42774 - protein, 14 aa, synthetic construct
QAQYSRIGPNAQTQ

SEQ ID NO: 42775 - protein, 14 aa, synthetic construct
QAQYSRIGPNATAE

SEQ ID NO: 42776 - protein, 14 aa, synthetic construct
QAQYSRIGPNATAQ

SEQ ID NO: 42777 - protein, 14 aa, synthetic construct
QAQYSRIGPNATPE

SEQ ID NO: 42778 - protein, 14 aa, synthetic construct
QAQYSRIGPNATSE

SEQ ID NO: 42779 - protein, 14 aa, synthetic construct
QAQYSRIGPNATTE

SEQ ID NO: 42780 - protein, 14 aa, synthetic construct
QAQYSRIGPNDQAQ

SEQ ID NO: 42781 - protein, 14 aa, synthetic construct
QAQYSRIGPNEQAQ

SEQ ID NO: 42782 - protein, 14 aa, synthetic construct
QAQYSRIGPNHTAE

SEQ ID NO: 42783 - protein, 14 aa, synthetic construct
QAQYSRIGPNIQAQ

SEQ ID NO: 42784 - protein, 14 aa, synthetic construct
QAQYSRIGPNITAE

SEQ ID NO: 42785 - protein, 14 aa, synthetic construct
QAQYSRIGPNNEAA

SEQ ID NO: 42786 - protein, 14 aa, synthetic construct
QAQYSRIGPNNQAQ

SEQ ID NO: 42787 - protein, 14 aa, synthetic construct
QAQYSRIGPNNTAE

SEQ ID NO: 42788 - protein, 14 aa, synthetic construct
QAQYSRIGPNPMAE

SEQ ID NO: 42789 - protein, 14 aa, synthetic construct
QAQYSRIGPNPQAE

SEQ ID NO: 42790 - protein, 14 aa, synthetic construct
QAQYSRIGPNPQAQ

SEQ ID NO: 42791 - protein, 14 aa, synthetic construct
QAQYSRIGPNPQPE

SEQ ID NO: 42792 - protein, 14 aa, synthetic construct
QAQYSRIGPNPQSE

SEQ ID NO: 42793 - protein, 14 aa, synthetic construct
QAQYSRIGPNPQVE

SEQ ID NO: 42794 - protein, 14 aa, synthetic construct
QAQYSRIGPNPTAE

SEQ ID NO: 42795 - protein, 14 aa, synthetic construct
QAQYSRIGPNPVAE

SEQ ID NO: 42796 - protein, 14 aa, synthetic construct
QAQYSRIGPNQQAQ

SEQ ID NO: 42797 - protein, 14 aa, synthetic construct
QAQYSRIGPNVTAE

SEQ ID NO: 42798 - protein, 14 aa, synthetic construct
QAQYSRIGPNYQAQ

SEQ ID NO: 42799 - protein, 14 aa, synthetic construct
QMQYSRIGPNAQAQ

SEQ ID NO: 42800 - protein, 14 aa, synthetic construct
QPQYSRIGPNAQAQ

SEQ ID NO: 42801 - protein, 14 aa, synthetic construct
QPQYSRIGPNATAE

SEQ ID NO: 42802 - protein, 14 aa, synthetic construct
RAQYSRIGPNDQAQ

SEQ ID NO: 42803 - protein, 14 aa, synthetic construct
SAAYSRIGPNPQAQ

SEQ ID NO: 42804 - protein, 14 aa, synthetic construct
SAQYSRIGPNAAAA

SEQ ID NO: 42805 - protein, 14 aa, synthetic construct
SAQYSRIGPNAAAE

SEQ ID NO: 42806 - protein, 14 aa, synthetic construct
SAQYSRIGPNAAAN

SEQ ID NO: 42807 - protein, 14 aa, synthetic construct
SAQYSRIGPNAAAQ

SEQ ID NO: 42808 - protein, 14 aa, synthetic construct
SAQYSRIGPNAAAS

SEQ ID NO: 42809 - protein, 14 aa, synthetic construct
SAQYSRIGPNAAAT

SEQ ID NO: 42810 - protein, 14 aa, synthetic construct
SAQYSRIGPNAAAV

SEQ ID NO: 42811 - protein, 14 aa, synthetic construct
SAQYSRIGPNAACQ

SEQ ID NO: 42812 - protein, 14 aa, synthetic construct
SAQYSRIGPNAASQ

SEQ ID NO: 42813 - protein, 14 aa, synthetic construct
SAQYSRIGPNAATQ

SEQ ID NO: 42814 - protein, 14 aa, synthetic construct
SAQYSRIGPNAAVQ

SEQ ID NO: 42815 - protein, 14 aa, synthetic construct
SAQYSRIGPNAEAA

SEQ ID NO: 42816 - protein, 14 aa, synthetic construct
SAQYSRIGPNAEAG

SEQ ID NO: 42817 - protein, 14 aa, synthetic construct
SAQYSRIGPNAEAQ

SEQ ID NO: 42818 - protein, 14 aa, synthetic construct
SAQYSRIGPNAEAS

SEQ ID NO: 42819 - protein, 14 aa, synthetic construct
SAQYSRIGPNAEAT

SEQ ID NO: 42820 - protein, 14 aa, synthetic construct
SAQYSRIGPNAEAV

SEQ ID NO: 42821 - protein, 14 aa, synthetic construct
SAQYSRIGPNAECQ

SEQ ID NO: 42822 - protein, 14 aa, synthetic construct
SAQYSRIGPNAESQ

SEQ ID NO: 42823 - protein, 14 aa, synthetic construct
SAQYSRIGPNAETQ

SEQ ID NO: 42824 - protein, 14 aa, synthetic construct
SAQYSRIGPNAIAA

SEQ ID NO: 42825 - protein, 14 aa, synthetic construct
SAQYSRIGPNAIAE

SEQ ID NO: 42826 - protein, 14 aa, synthetic construct
SAQYSRIGPNAIAQ

SEQ ID NO: 42827 - protein, 14 aa, synthetic construct
SAQYSRIGPNAIAT

SEQ ID NO: 42828 - protein, 14 aa, synthetic construct
SAQYSRIGPNAICQ

SEQ ID NO: 42829 - protein, 14 aa, synthetic construct
SAQYSRIGPNAIFQ

SEQ ID NO: 42830 - protein, 14 aa, synthetic construct
SAQYSRIGPNAIIQ

SEQ ID NO: 42831 - protein, 14 aa, synthetic construct
SAQYSRIGPNAIPQ

SEQ ID NO: 42832 - protein, 14 aa, synthetic construct
SAQYSRIGPNAISQ

SEQ ID NO: 42833 - protein, 14 aa, synthetic construct
SAQYSRIGPNAITQ

SEQ ID NO: 42834 - protein, 14 aa, synthetic construct
SAQYSRIGPNAIVQ

SEQ ID NO: 42835 - protein, 14 aa, synthetic construct
SAQYSRIGPNAKAD

SEQ ID NO: 42836 - protein, 14 aa, synthetic construct
SAQYSRIGPNAKAE

SEQ ID NO: 42837 - protein, 14 aa, synthetic construct
SAQYSRIGPNALAA

SEQ ID NO: 42838 - protein, 14 aa, synthetic construct
SAQYSRIGPNALAE

SEQ ID NO: 42839 - protein, 14 aa, synthetic construct
SAQYSRIGPNALAT

SEQ ID NO: 42840 - protein, 14 aa, synthetic construct
SAQYSRIGPNALPQ

SEQ ID NO: 42841 - protein, 14 aa, synthetic construct
SAQYSRIGPNALSQ

SEQ ID NO: 42842 - protein, 14 aa, synthetic construct
SAQYSRIGPNAMAA

SEQ ID NO: 42843 - protein, 14 aa, synthetic construct
SAQYSRIGPNAMAE

SEQ ID NO: 42844 - protein, 14 aa, synthetic construct
SAQYSRIGPNAMAG

SEQ ID NO: 42845 - protein, 14 aa, synthetic construct
SAQYSRIGPNAMAI

SEQ ID NO: 42846 - protein, 14 aa, synthetic construct
SAQYSRIGPNAMAL

SEQ ID NO: 42847 - protein, 14 aa, synthetic construct
SAQYSRIGPNAMAM

SEQ ID NO: 42848 - protein, 14 aa, synthetic construct
SAQYSRIGPNAMAN

SEQ ID NO: 42849 - protein, 14 aa, synthetic construct
SAQYSRIGPNAMAQ

SEQ ID NO: 42850 - protein, 14 aa, synthetic construct
SAQYSRIGPNAMAS

SEQ ID NO: 42851 - protein, 14 aa, synthetic construct
SAQYSRIGPNAMAT

SEQ ID NO: 42852 - protein, 14 aa, synthetic construct
SAQYSRIGPNAMAV

SEQ ID NO: 42853 - protein, 14 aa, synthetic construct
SAQYSRIGPNAMCQ

SEQ ID NO: 42854 - protein, 14 aa, synthetic construct
SAQYSRIGPNAMGQ

SEQ ID NO: 42855 - protein, 14 aa, synthetic construct
SAQYSRIGPNAMIQ

SEQ ID NO: 42856 - protein, 14 aa, synthetic construct
SAQYSRIGPNAMPQ

SEQ ID NO: 42857 - protein, 14 aa, synthetic construct
SAQYSRIGPNAMSQ

SEQ ID NO: 42858 - protein, 14 aa, synthetic construct
SAQYSRIGPNAMTQ

SEQ ID NO: 42859 - protein, 14 aa, synthetic construct
SAQYSRIGPNAMVQ

SEQ ID NO: 42860 - protein, 14 aa, synthetic construct
SAQYSRIGPNANAQ

SEQ ID NO: 42861 - protein, 14 aa, synthetic construct
SAQYSRIGPNANAT

SEQ ID NO: 42862 - protein, 14 aa, synthetic construct
SAQYSRIGPNANSQ

SEQ ID NO: 42863 - protein, 14 aa, synthetic construct
SAQYSRIGPNAPAA

SEQ ID NO: 42864 - protein, 14 aa, synthetic construct
SAQYSRIGPNAPAE

SEQ ID NO: 42865 - protein, 14 aa, synthetic construct
SAQYSRIGPNAPAG

SEQ ID NO: 42866 - protein, 14 aa, synthetic construct
SAQYSRIGPNAPAI

SEQ ID NO: 42867 - protein, 14 aa, synthetic construct
SAQYSRIGPNAPAL

SEQ ID NO: 42868 - protein, 14 aa, synthetic construct
SAQYSRIGPNAPAM

SEQ ID NO: 42869 - protein, 14 aa, synthetic construct
SAQYSRIGPNAPAN

SEQ ID NO: 42870 - protein, 14 aa, synthetic construct
SAQYSRIGPNAPAQ

SEQ ID NO: 42871 - protein, 14 aa, synthetic construct
SAQYSRIGPNAPAS

SEQ ID NO: 42872 - protein, 14 aa, synthetic construct
SAQYSRIGPNAPAT

SEQ ID NO: 42873 - protein, 14 aa, synthetic construct
SAQYSRIGPNAPAV

SEQ ID NO: 42874 - protein, 14 aa, synthetic construct
SAQYSRIGPNAPCQ

SEQ ID NO: 42875 - protein, 14 aa, synthetic construct
SAQYSRIGPNAPPQ

SEQ ID NO: 42876 - protein, 14 aa, synthetic construct
SAQYSRIGPNAPSQ

SEQ ID NO: 42877 - protein, 14 aa, synthetic construct
SAQYSRIGPNAPTQ

SEQ ID NO: 42878 - protein, 14 aa, synthetic construct
SAQYSRIGPNAPVQ

SEQ ID NO: 42879 - protein, 14 aa, synthetic construct
SAQYSRIGPNAQAA

SEQ ID NO: 42880 - protein, 14 aa, synthetic construct
SAQYSRIGPNAQAE

SEQ ID NO: 42881 - protein, 14 aa, synthetic construct
SAQYSRIGPNAQAG

SEQ ID NO: 42882 - protein, 14 aa, synthetic construct
SAQYSRIGPNAQAI

SEQ ID NO: 42883 - protein, 14 aa, synthetic construct
SAQYSRIGPNAQAL

SEQ ID NO: 42884 - protein, 14 aa, synthetic construct
SAQYSRIGPNAQAM

SEQ ID NO: 42885 - protein, 14 aa, synthetic construct
SAQYSRIGPNAQAN

SEQ ID NO: 42886 - protein, 14 aa, synthetic construct
SAQYSRIGPNAQAS

SEQ ID NO: 42887 - protein, 14 aa, synthetic construct
SAQYSRIGPNAQAT

SEQ ID NO: 42888 - protein, 14 aa, synthetic construct
SAQYSRIGPNAQAV

SEQ ID NO: 42889 - protein, 14 aa, synthetic construct
SAQYSRIGPNAQCA

SEQ ID NO: 42890 - protein, 14 aa, synthetic construct
SAQYSRIGPNAQCE

SEQ ID NO: 42891 - protein, 14 aa, synthetic construct
SAQYSRIGPNAQCQ

SEQ ID NO: 42892 - protein, 14 aa, synthetic construct
SAQYSRIGPNAQCS

SEQ ID NO: 42893 - protein, 14 aa, synthetic construct
SAQYSRIGPNAQCT

SEQ ID NO: 42894 - protein, 14 aa, synthetic construct
SAQYSRIGPNAQGE

SEQ ID NO: 42895 - protein, 14 aa, synthetic construct
SAQYSRIGPNAQGQ

SEQ ID NO: 42896 - protein, 14 aa, synthetic construct
SAQYSRIGPNAQGT

SEQ ID NO: 42897 - protein, 14 aa, synthetic construct
SAQYSRIGPNAQHE

SEQ ID NO: 42898 - protein, 14 aa, synthetic construct
SAQYSRIGPNAQPA

SEQ ID NO: 42899 - protein, 14 aa, synthetic construct
SAQYSRIGPNAQPE

SEQ ID NO: 42900 - protein, 14 aa, synthetic construct
SAQYSRIGPNAQPI

SEQ ID NO: 42901 - protein, 14 aa, synthetic construct
SAQYSRIGPNAQPL

SEQ ID NO: 42902 - protein, 14 aa, synthetic construct
SAQYSRIGPNAQPN

SEQ ID NO: 42903 - protein, 14 aa, synthetic construct
SAQYSRIGPNAQPQ

SEQ ID NO: 42904 - protein, 14 aa, synthetic construct
SAQYSRIGPNAQPS

SEQ ID NO: 42905 - protein, 14 aa, synthetic construct
SAQYSRIGPNAQPT

SEQ ID NO: 42906 - protein, 14 aa, synthetic construct
SAQYSRIGPNAQPV

SEQ ID NO: 42907 - protein, 14 aa, synthetic construct
SAQYSRIGPNAQSA

SEQ ID NO: 42908 - protein, 14 aa, synthetic construct
SAQYSRIGPNAQSE

SEQ ID NO: 42909 - protein, 14 aa, synthetic construct
SAQYSRIGPNAQSG

SEQ ID NO: 42910 - protein, 14 aa, synthetic construct
SAQYSRIGPNAQSL

SEQ ID NO: 42911 - protein, 14 aa, synthetic construct
SAQYSRIGPNAQSN

SEQ ID NO: 42912 - protein, 14 aa, synthetic construct
SAQYSRIGPNAQSQ

SEQ ID NO: 42913 - protein, 14 aa, synthetic construct
SAQYSRIGPNAQSS

SEQ ID NO: 42914 - protein, 14 aa, synthetic construct
SAQYSRIGPNAQST

SEQ ID NO: 42915 - protein, 14 aa, synthetic construct
SAQYSRIGPNAQSV

SEQ ID NO: 42916 - protein, 14 aa, synthetic construct
SAQYSRIGPNAQTA

SEQ ID NO: 42917 - protein, 14 aa, synthetic construct
SAQYSRIGPNAQTE

SEQ ID NO: 42918 - protein, 14 aa, synthetic construct
SAQYSRIGPNAQTQ

SEQ ID NO: 42919 - protein, 14 aa, synthetic construct
SAQYSRIGPNAQTS

SEQ ID NO: 42920 - protein, 14 aa, synthetic construct
SAQYSRIGPNAQTT

SEQ ID NO: 42921 - protein, 14 aa, synthetic construct
SAQYSRIGPNAQVA

SEQ ID NO: 42922 - protein, 14 aa, synthetic construct
SAQYSRIGPNAQVE

SEQ ID NO: 42923 - protein, 14 aa, synthetic construct
SAQYSRIGPNAQVN

SEQ ID NO: 42924 - protein, 14 aa, synthetic construct
SAQYSRIGPNAQVQ

SEQ ID NO: 42925 - protein, 14 aa, synthetic construct
SAQYSRIGPNAQVS

SEQ ID NO: 42926 - protein, 14 aa, synthetic construct
SAQYSRIGPNAQVT

SEQ ID NO: 42927 - protein, 14 aa, synthetic construct
SAQYSRIGPNASAA

SEQ ID NO: 42928 - protein, 14 aa, synthetic construct
SAQYSRIGPNASAE

SEQ ID NO: 42929 - protein, 14 aa, synthetic construct
SAQYSRIGPNASAG

SEQ ID NO: 42930 - protein, 14 aa, synthetic construct
SAQYSRIGPNASAN

SEQ ID NO: 42931 - protein, 14 aa, synthetic construct
SAQYSRIGPNASAQ

SEQ ID NO: 42932 - protein, 14 aa, synthetic construct
SAQYSRIGPNASAS

SEQ ID NO: 42933 - protein, 14 aa, synthetic construct
SAQYSRIGPNASAT

SEQ ID NO: 42934 - protein, 14 aa, synthetic construct
SAQYSRIGPNASAV

SEQ ID NO: 42935 - protein, 14 aa, synthetic construct
SAQYSRIGPNASCQ

SEQ ID NO: 42936 - protein, 14 aa, synthetic construct
SAQYSRIGPNASSQ

SEQ ID NO: 42937 - protein, 14 aa, synthetic construct
SAQYSRIGPNASTQ

SEQ ID NO: 42938 - protein, 14 aa, synthetic construct
SAQYSRIGPNASVQ

SEQ ID NO: 42939 - protein, 14 aa, synthetic construct
SAQYSRIGPNATAA

SEQ ID NO: 42940 - protein, 14 aa, synthetic construct
SAQYSRIGPNATAD

SEQ ID NO: 42941 - protein, 14 aa, synthetic construct
SAQYSRIGPNATAE

SEQ ID NO: 42942 - protein, 14 aa, synthetic construct
SAQYSRIGPNATAG

SEQ ID NO: 42943 - protein, 14 aa, synthetic construct
SAQYSRIGPNATAI

SEQ ID NO: 42944 - protein, 14 aa, synthetic construct
SAQYSRIGPNATAL

SEQ ID NO: 42945 - protein, 14 aa, synthetic construct
SAQYSRIGPNATAM

SEQ ID NO: 42946 - protein, 14 aa, synthetic construct
SAQYSRIGPNATAQ

SEQ ID NO: 42947 - protein, 14 aa, synthetic construct
SAQYSRIGPNATAS

SEQ ID NO: 42948 - protein, 14 aa, synthetic construct
SAQYSRIGPNATAT

SEQ ID NO: 42949 - protein, 14 aa, synthetic construct
SAQYSRIGPNATAV

SEQ ID NO: 42950 - protein, 14 aa, synthetic construct
SAQYSRIGPNATCQ

SEQ ID NO: 42951 - protein, 14 aa, synthetic construct
SAQYSRIGPNATGQ

SEQ ID NO: 42952 - protein, 14 aa, synthetic construct
SAQYSRIGPNATIQ

SEQ ID NO: 42953 - protein, 14 aa, synthetic construct
SAQYSRIGPNATPE

SEQ ID NO: 42954 - protein, 14 aa, synthetic construct
SAQYSRIGPNATPQ

SEQ ID NO: 42955 - protein, 14 aa, synthetic construct
SAQYSRIGPNATSE

SEQ ID NO: 42956 - protein, 14 aa, synthetic construct
SAQYSRIGPNATSQ

SEQ ID NO: 42957 - protein, 14 aa, synthetic construct
SAQYSRIGPNATTE

SEQ ID NO: 42958 - protein, 14 aa, synthetic construct
SAQYSRIGPNATTQ

SEQ ID NO: 42959 - protein, 14 aa, synthetic construct
SAQYSRIGPNATVE

SEQ ID NO: 42960 - protein, 14 aa, synthetic construct
SAQYSRIGPNATVQ

SEQ ID NO: 42961 - protein, 14 aa, synthetic construct
SAQYSRIGPNAVAA

SEQ ID NO: 42962 - protein, 14 aa, synthetic construct
SAQYSRIGPNAVAD

SEQ ID NO: 42963 - protein, 14 aa, synthetic construct
SAQYSRIGPNAVAE

SEQ ID NO: 42964 - protein, 14 aa, synthetic construct
SAQYSRIGPNAVAG

SEQ ID NO: 42965 - protein, 14 aa, synthetic construct
SAQYSRIGPNAVAT

SEQ ID NO: 42966 - protein, 14 aa, synthetic construct
SAQYSRIGPNAVFQ

SEQ ID NO: 42967 - protein, 14 aa, synthetic construct
SAQYSRIGPNAVHQ

SEQ ID NO: 42968 - protein, 14 aa, synthetic construct
SAQYSRIGPNAVIQ

SEQ ID NO: 42969 - protein, 14 aa, synthetic construct
SAQYSRIGPNAVPQ

SEQ ID NO: 42970 - protein, 14 aa, synthetic construct
SAQYSRIGPNAVSQ

SEQ ID NO: 42971 - protein, 14 aa, synthetic construct
SAQYSRIGPNAVTQ

SEQ ID NO: 42972 - protein, 14 aa, synthetic construct
SAQYSRIGPNAVVQ

SEQ ID NO: 42973 - protein, 14 aa, synthetic construct
SAQYSRIGPNAVYQ

SEQ ID NO: 42974 - protein, 14 aa, synthetic construct
SAQYSRIGPNCQAS

SEQ ID NO: 42975 - protein, 14 aa, synthetic construct
SAQYSRIGPNCQAT

SEQ ID NO: 42976 - protein, 14 aa, synthetic construct
SAQYSRIGPNDAAQ

SEQ ID NO: 42977 - protein, 14 aa, synthetic construct
SAQYSRIGPNDIAQ

SEQ ID NO: 42978 - protein, 14 aa, synthetic construct
SAQYSRIGPNDLAQ

SEQ ID NO: 42979 - protein, 14 aa, synthetic construct
SAQYSRIGPNDMAQ

SEQ ID NO: 42980 - protein, 14 aa, synthetic construct
SAQYSRIGPNDQAA

SEQ ID NO: 42981 - protein, 14 aa, synthetic construct
SAQYSRIGPNDQAC

SEQ ID NO: 42982 - protein, 14 aa, synthetic construct
SAQYSRIGPNDQAE

SEQ ID NO: 42983 - protein, 14 aa, synthetic construct
SAQYSRIGPNDQAG

SEQ ID NO: 42984 - protein, 14 aa, synthetic construct
SAQYSRIGPNDQAI

SEQ ID NO: 42985 - protein, 14 aa, synthetic construct
SAQYSRIGPNDQAK

SEQ ID NO: 42986 - protein, 14 aa, synthetic construct
SAQYSRIGPNDQAL

SEQ ID NO: 42987 - protein, 14 aa, synthetic construct
SAQYSRIGPNDQAM

SEQ ID NO: 42988 - protein, 14 aa, synthetic construct
SAQYSRIGPNDQAN

SEQ ID NO: 42989 - protein, 14 aa, synthetic construct
SAQYSRIGPNDQAQ

SEQ ID NO: 42990 - protein, 14 aa, synthetic construct
SAQYSRIGPNDQAR

SEQ ID NO: 42991 - protein, 14 aa, synthetic construct
SAQYSRIGPNDQAS

SEQ ID NO: 42992 - protein, 14 aa, synthetic construct
SAQYSRIGPNDQAT

SEQ ID NO: 42993 - protein, 14 aa, synthetic construct
SAQYSRIGPNDQAV

SEQ ID NO: 42994 - protein, 14 aa, synthetic construct
SAQYSRIGPNDQCQ

SEQ ID NO: 42995 - protein, 14 aa, synthetic construct
SAQYSRIGPNDQPQ

SEQ ID NO: 42996 - protein, 14 aa, synthetic construct
SAQYSRIGPNDQSQ

SEQ ID NO: 42997 - protein, 14 aa, synthetic construct
SAQYSRIGPNDQTQ

SEQ ID NO: 42998 - protein, 14 aa, synthetic construct
SAQYSRIGPNDQVQ

SEQ ID NO: 42999 - protein, 14 aa, synthetic construct
SAQYSRIGPNDSAQ

SEQ ID NO: 43000 - protein, 14 aa, synthetic construct
SAQYSRIGPNDTAQ

SEQ ID NO: 43001 - protein, 14 aa, synthetic construct
SAQYSRIGPNDTPE

SEQ ID NO: 43002 - protein, 14 aa, synthetic construct
SAQYSRIGPNDVAQ

SEQ ID NO: 43003 - protein, 14 aa, synthetic construct
SAQYSRIGPNEAAQ

SEQ ID NO: 43004 - protein, 14 aa, synthetic construct
SAQYSRIGPNEIAQ

SEQ ID NO: 43005 - protein, 14 aa, synthetic construct
SAQYSRIGPNELAQ

SEQ ID NO: 43006 - protein, 14 aa, synthetic construct
SAQYSRIGPNEMAQ

SEQ ID NO: 43007 - protein, 14 aa, synthetic construct
SAQYSRIGPNEQAA

SEQ ID NO: 43008 - protein, 14 aa, synthetic construct
SAQYSRIGPNEQAG

SEQ ID NO: 43009 - protein, 14 aa, synthetic construct
SAQYSRIGPNEQAI

SEQ ID NO: 43010 - protein, 14 aa, synthetic construct
SAQYSRIGPNEQAK

SEQ ID NO: 43011 - protein, 14 aa, synthetic construct
SAQYSRIGPNEQAL

SEQ ID NO: 43012 - protein, 14 aa, synthetic construct
SAQYSRIGPNEQAM

SEQ ID NO: 43013 - protein, 14 aa, synthetic construct
SAQYSRIGPNEQAN

SEQ ID NO: 43014 - protein, 14 aa, synthetic construct
SAQYSRIGPNEQAQ

SEQ ID NO: 43015 - protein, 14 aa, synthetic construct
SAQYSRIGPNEQAR

SEQ ID NO: 43016 - protein, 14 aa, synthetic construct
SAQYSRIGPNEQAS

SEQ ID NO: 43017 - protein, 14 aa, synthetic construct
SAQYSRIGPNEQAT

SEQ ID NO: 43018 - protein, 14 aa, synthetic construct
SAQYSRIGPNEQAV

SEQ ID NO: 43019 - protein, 14 aa, synthetic construct
SAQYSRIGPNEQCQ

SEQ ID NO: 43020 - protein, 14 aa, synthetic construct
SAQYSRIGPNEQGQ

SEQ ID NO: 43021 - protein, 14 aa, synthetic construct
SAQYSRIGPNEQPQ

SEQ ID NO: 43022 - protein, 14 aa, synthetic construct
SAQYSRIGPNEQSQ

SEQ ID NO: 43023 - protein, 14 aa, synthetic construct
SAQYSRIGPNEQTQ

SEQ ID NO: 43024 - protein, 14 aa, synthetic construct
SAQYSRIGPNEQVQ

SEQ ID NO: 43025 - protein, 14 aa, synthetic construct
SAQYSRIGPNESAQ

SEQ ID NO: 43026 - protein, 14 aa, synthetic construct
SAQYSRIGPNETAQ

SEQ ID NO: 43027 - protein, 14 aa, synthetic construct
SAQYSRIGPNETPE

SEQ ID NO: 43028 - protein, 14 aa, synthetic construct
SAQYSRIGPNETTE

SEQ ID NO: 43029 - protein, 14 aa, synthetic construct
SAQYSRIGPNEVAQ

SEQ ID NO: 43030 - protein, 14 aa, synthetic construct
SAQYSRIGPNFAAQ

SEQ ID NO: 43031 - protein, 14 aa, synthetic construct
SAQYSRIGPNFEAQ

SEQ ID NO: 43032 - protein, 14 aa, synthetic construct
SAQYSRIGPNFPAQ

SEQ ID NO: 43033 - protein, 14 aa, synthetic construct
SAQYSRIGPNFQAA

SEQ ID NO: 43034 - protein, 14 aa, synthetic construct
SAQYSRIGPNFQAE

SEQ ID NO: 43035 - protein, 14 aa, synthetic construct
SAQYSRIGPNFQAG

SEQ ID NO: 43036 - protein, 14 aa, synthetic construct
SAQYSRIGPNFQAQ

SEQ ID NO: 43037 - protein, 14 aa, synthetic construct
SAQYSRIGPNFQAS

SEQ ID NO: 43038 - protein, 14 aa, synthetic construct
SAQYSRIGPNFQAT

SEQ ID NO: 43039 - protein, 14 aa, synthetic construct
SAQYSRIGPNFQSQ

SEQ ID NO: 43040 - protein, 14 aa, synthetic construct
SAQYSRIGPNHAAQ

SEQ ID NO: 43041 - protein, 14 aa, synthetic construct
SAQYSRIGPNHDAQ

SEQ ID NO: 43042 - protein, 14 aa, synthetic construct
SAQYSRIGPNHEAQ

SEQ ID NO: 43043 - protein, 14 aa, synthetic construct
SAQYSRIGPNHNAQ

SEQ ID NO: 43044 - protein, 14 aa, synthetic construct
SAQYSRIGPNHPAQ

SEQ ID NO: 43045 - protein, 14 aa, synthetic construct
SAQYSRIGPNHQAA

SEQ ID NO: 43046 - protein, 14 aa, synthetic construct
SAQYSRIGPNHQAD

SEQ ID NO: 43047 - protein, 14 aa, synthetic construct
SAQYSRIGPNHQAE

SEQ ID NO: 43048 - protein, 14 aa, synthetic construct
SAQYSRIGPNHQAG

SEQ ID NO: 43049 - protein, 14 aa, synthetic construct
SAQYSRIGPNHQAL

SEQ ID NO: 43050 - protein, 14 aa, synthetic construct
SAQYSRIGPNHQAN

SEQ ID NO: 43051 - protein, 14 aa, synthetic construct
SAQYSRIGPNHQAQ

SEQ ID NO: 43052 - protein, 14 aa, synthetic construct
SAQYSRIGPNHQAS

SEQ ID NO: 43053 - protein, 14 aa, synthetic construct
SAQYSRIGPNHQAT

SEQ ID NO: 43054 - protein, 14 aa, synthetic construct
SAQYSRIGPNHQAV

SEQ ID NO: 43055 - protein, 14 aa, synthetic construct
SAQYSRIGPNHQCQ

SEQ ID NO: 43056 - protein, 14 aa, synthetic construct
SAQYSRIGPNHQFQ

SEQ ID NO: 43057 - protein, 14 aa, synthetic construct
SAQYSRIGPNHQGQ

SEQ ID NO: 43058 - protein, 14 aa, synthetic construct
SAQYSRIGPNHQIQ

SEQ ID NO: 43059 - protein, 14 aa, synthetic construct
SAQYSRIGPNHQPQ

SEQ ID NO: 43060 - protein, 14 aa, synthetic construct
SAQYSRIGPNHQSQ

SEQ ID NO: 43061 - protein, 14 aa, synthetic construct
SAQYSRIGPNHQTQ

SEQ ID NO: 43062 - protein, 14 aa, synthetic construct
SAQYSRIGPNHTAE

SEQ ID NO: 43063 - protein, 14 aa, synthetic construct
SAQYSRIGPNHTPE

SEQ ID NO: 43064 - protein, 14 aa, synthetic construct
SAQYSRIGPNHTVE

SEQ ID NO: 43065 - protein, 14 aa, synthetic construct
SAQYSRIGPNIAAQ

SEQ ID NO: 43066 - protein, 14 aa, synthetic construct
SAQYSRIGPNIEAQ

SEQ ID NO: 43067 - protein, 14 aa, synthetic construct
SAQYSRIGPNIGAQ

SEQ ID NO: 43068 - protein, 14 aa, synthetic construct
SAQYSRIGPNIIAQ

SEQ ID NO: 43069 - protein, 14 aa, synthetic construct
SAQYSRIGPNIMAQ

SEQ ID NO: 43070 - protein, 14 aa, synthetic construct
SAQYSRIGPNINAQ

SEQ ID NO: 43071 - protein, 14 aa, synthetic construct
SAQYSRIGPNIQAA

SEQ ID NO: 43072 - protein, 14 aa, synthetic construct
SAQYSRIGPNIQAE

SEQ ID NO: 43073 - protein, 14 aa, synthetic construct
SAQYSRIGPNIQAG

SEQ ID NO: 43074 - protein, 14 aa, synthetic construct
SAQYSRIGPNIQAL

SEQ ID NO: 43075 - protein, 14 aa, synthetic construct
SAQYSRIGPNIQAM

SEQ ID NO: 43076 - protein, 14 aa, synthetic construct
SAQYSRIGPNIQAN

SEQ ID NO: 43077 - protein, 14 aa, synthetic construct
SAQYSRIGPNIQAQ

SEQ ID NO: 43078 - protein, 14 aa, synthetic construct
SAQYSRIGPNIQAS

SEQ ID NO: 43079 - protein, 14 aa, synthetic construct
SAQYSRIGPNIQAT

SEQ ID NO: 43080 - protein, 14 aa, synthetic construct
SAQYSRIGPNIQAV

SEQ ID NO: 43081 - protein, 14 aa, synthetic construct
SAQYSRIGPNIQCQ

SEQ ID NO: 43082 - protein, 14 aa, synthetic construct
SAQYSRIGPNIQGQ

SEQ ID NO: 43083 - protein, 14 aa, synthetic construct
SAQYSRIGPNIQPQ

SEQ ID NO: 43084 - protein, 14 aa, synthetic construct
SAQYSRIGPNIQSQ

SEQ ID NO: 43085 - protein, 14 aa, synthetic construct
SAQYSRIGPNIQTQ

SEQ ID NO: 43086 - protein, 14 aa, synthetic construct
SAQYSRIGPNIQVQ

SEQ ID NO: 43087 - protein, 14 aa, synthetic construct
SAQYSRIGPNISAQ

SEQ ID NO: 43088 - protein, 14 aa, synthetic construct
SAQYSRIGPNITAE

SEQ ID NO: 43089 - protein, 14 aa, synthetic construct
SAQYSRIGPNITAQ

SEQ ID NO: 43090 - protein, 14 aa, synthetic construct
SAQYSRIGPNITPE

SEQ ID NO: 43091 - protein, 14 aa, synthetic construct
SAQYSRIGPNIVAQ

SEQ ID NO: 43092 - protein, 14 aa, synthetic construct
SAQYSRIGPNLQAA

SEQ ID NO: 43093 - protein, 14 aa, synthetic construct
SAQYSRIGPNLQAQ

SEQ ID NO: 43094 - protein, 14 aa, synthetic construct
SAQYSRIGPNLQAS

SEQ ID NO: 43095 - protein, 14 aa, synthetic construct
SAQYSRIGPNLQAT

SEQ ID NO: 43096 - protein, 14 aa, synthetic construct
SAQYSRIGPNLQCQ

SEQ ID NO: 43097 - protein, 14 aa, synthetic construct
SAQYSRIGPNLQPQ

SEQ ID NO: 43098 - protein, 14 aa, synthetic construct
SAQYSRIGPNLQSQ

SEQ ID NO: 43099 - protein, 14 aa, synthetic construct
SAQYSRIGPNLQTQ

SEQ ID NO: 43100 - protein, 14 aa, synthetic construct
SAQYSRIGPNLTPE

SEQ ID NO: 43101 - protein, 14 aa, synthetic construct
SAQYSRIGPNMMAQ

SEQ ID NO: 43102 - protein, 14 aa, synthetic construct
SAQYSRIGPNMPAQ

SEQ ID NO: 43103 - protein, 14 aa, synthetic construct
SAQYSRIGPNMQAA

SEQ ID NO: 43104 - protein, 14 aa, synthetic construct
SAQYSRIGPNMQAG

SEQ ID NO: 43105 - protein, 14 aa, synthetic construct
SAQYSRIGPNMQAL

SEQ ID NO: 43106 - protein, 14 aa, synthetic construct
SAQYSRIGPNMQAQ

SEQ ID NO: 43107 - protein, 14 aa, synthetic construct
SAQYSRIGPNMQAS

SEQ ID NO: 43108 - protein, 14 aa, synthetic construct
SAQYSRIGPNMQAT

SEQ ID NO: 43109 - protein, 14 aa, synthetic construct
SAQYSRIGPNMQCQ

SEQ ID NO: 43110 - protein, 14 aa, synthetic construct
SAQYSRIGPNMQPQ

SEQ ID NO: 43111 - protein, 14 aa, synthetic construct
SAQYSRIGPNMQSQ

SEQ ID NO: 43112 - protein, 14 aa, synthetic construct
SAQYSRIGPNMQTQ

SEQ ID NO: 43113 - protein, 14 aa, synthetic construct
SAQYSRIGPNMTAE

SEQ ID NO: 43114 - protein, 14 aa, synthetic construct
SAQYSRIGPNMTPE

SEQ ID NO: 43115 - protein, 14 aa, synthetic construct
SAQYSRIGPNMTSE

SEQ ID NO: 43116 - protein, 14 aa, synthetic construct
SAQYSRIGPNNAAQ

SEQ ID NO: 43117 - protein, 14 aa, synthetic construct
SAQYSRIGPNNDAA

SEQ ID NO: 43118 - protein, 14 aa, synthetic construct
SAQYSRIGPNNDAQ

SEQ ID NO: 43119 - protein, 14 aa, synthetic construct
SAQYSRIGPNNDAT

SEQ ID NO: 43120 - protein, 14 aa, synthetic construct
SAQYSRIGPNNEAA

SEQ ID NO: 43121 - protein, 14 aa, synthetic construct
SAQYSRIGPNNEAQ

SEQ ID NO: 43122 - protein, 14 aa, synthetic construct
SAQYSRIGPNNEAT

SEQ ID NO: 43123 - protein, 14 aa, synthetic construct
SAQYSRIGPNNEPA

SEQ ID NO: 43124 - protein, 14 aa, synthetic construct
SAQYSRIGPNNESA

SEQ ID NO: 43125 - protein, 14 aa, synthetic construct
SAQYSRIGPNNETA

SEQ ID NO: 43126 - protein, 14 aa, synthetic construct
SAQYSRIGPNNEVA

SEQ ID NO: 43127 - protein, 14 aa, synthetic construct
SAQYSRIGPNNFAQ

SEQ ID NO: 43128 - protein, 14 aa, synthetic construct
SAQYSRIGPNNGAQ

SEQ ID NO: 43129 - protein, 14 aa, synthetic construct
SAQYSRIGPNNIAQ

SEQ ID NO: 43130 - protein, 14 aa, synthetic construct
SAQYSRIGPNNLAQ

SEQ ID NO: 43131 - protein, 14 aa, synthetic construct
SAQYSRIGPNNMAQ

SEQ ID NO: 43132 - protein, 14 aa, synthetic construct
SAQYSRIGPNNNAQ

SEQ ID NO: 43133 - protein, 14 aa, synthetic construct
SAQYSRIGPNNPAQ

SEQ ID NO: 43134 - protein, 14 aa, synthetic construct
SAQYSRIGPNNQAA

SEQ ID NO: 43135 - protein, 14 aa, synthetic construct
SAQYSRIGPNNQAC

SEQ ID NO: 43136 - protein, 14 aa, synthetic construct
SAQYSRIGPNNQAD

SEQ ID NO: 43137 - protein, 14 aa, synthetic construct
SAQYSRIGPNNQAE

SEQ ID NO: 43138 - protein, 14 aa, synthetic construct
SAQYSRIGPNNQAF

SEQ ID NO: 43139 - protein, 14 aa, synthetic construct
SAQYSRIGPNNQAG

SEQ ID NO: 43140 - protein, 14 aa, synthetic construct
SAQYSRIGPNNQAI

SEQ ID NO: 43141 - protein, 14 aa, synthetic construct
SAQYSRIGPNNQAL

SEQ ID NO: 43142 - protein, 14 aa, synthetic construct
SAQYSRIGPNNQAM

SEQ ID NO: 43143 - protein, 14 aa, synthetic construct
SAQYSRIGPNNQAN

SEQ ID NO: 43144 - protein, 14 aa, synthetic construct
SAQYSRIGPNNQAQ

SEQ ID NO: 43145 - protein, 14 aa, synthetic construct
SAQYSRIGPNNQAS

SEQ ID NO: 43146 - protein, 14 aa, synthetic construct
SAQYSRIGPNNQAT

SEQ ID NO: 43147 - protein, 14 aa, synthetic construct
SAQYSRIGPNNQAV

SEQ ID NO: 43148 - protein, 14 aa, synthetic construct
SAQYSRIGPNNQAY

SEQ ID NO: 43149 - protein, 14 aa, synthetic construct
SAQYSRIGPNNQCQ

SEQ ID NO: 43150 - protein, 14 aa, synthetic construct
SAQYSRIGPNNQFQ

SEQ ID NO: 43151 - protein, 14 aa, synthetic construct
SAQYSRIGPNNQGQ

SEQ ID NO: 43152 - protein, 14 aa, synthetic construct
SAQYSRIGPNNQHQ

SEQ ID NO: 43153 - protein, 14 aa, synthetic construct
SAQYSRIGPNNQIQ

SEQ ID NO: 43154 - protein, 14 aa, synthetic construct
SAQYSRIGPNNQPQ

SEQ ID NO: 43155 - protein, 14 aa, synthetic construct
SAQYSRIGPNNQQQ

SEQ ID NO: 43156 - protein, 14 aa, synthetic construct
SAQYSRIGPNNQSQ

SEQ ID NO: 43157 - protein, 14 aa, synthetic construct
SAQYSRIGPNNQTQ

SEQ ID NO: 43158 - protein, 14 aa, synthetic construct
SAQYSRIGPNNQVQ

SEQ ID NO: 43159 - protein, 14 aa, synthetic construct
SAQYSRIGPNNQWQ

SEQ ID NO: 43160 - protein, 14 aa, synthetic construct
SAQYSRIGPNNQYQ

SEQ ID NO: 43161 - protein, 14 aa, synthetic construct
SAQYSRIGPNNSAQ

SEQ ID NO: 43162 - protein, 14 aa, synthetic construct
SAQYSRIGPNNTAE

SEQ ID NO: 43163 - protein, 14 aa, synthetic construct
SAQYSRIGPNNTAQ

SEQ ID NO: 43164 - protein, 14 aa, synthetic construct
SAQYSRIGPNNTFE

SEQ ID NO: 43165 - protein, 14 aa, synthetic construct
SAQYSRIGPNNTGE

SEQ ID NO: 43166 - protein, 14 aa, synthetic construct
SAQYSRIGPNNTHE

SEQ ID NO: 43167 - protein, 14 aa, synthetic construct
SAQYSRIGPNNTIE

SEQ ID NO: 43168 - protein, 14 aa, synthetic construct
SAQYSRIGPNNTPE

SEQ ID NO: 43169 - protein, 14 aa, synthetic construct
SAQYSRIGPNNTSE

SEQ ID NO: 43170 - protein, 14 aa, synthetic construct
SAQYSRIGPNNTTE

SEQ ID NO: 43171 - protein, 14 aa, synthetic construct
SAQYSRIGPNNTVE

SEQ ID NO: 43172 - protein, 14 aa, synthetic construct
SAQYSRIGPNNTYE

SEQ ID NO: 43173 - protein, 14 aa, synthetic construct
SAQYSRIGPNNVAQ

SEQ ID NO: 43174 - protein, 14 aa, synthetic construct
SAQYSRIGPNPAAE

SEQ ID NO: 43175 - protein, 14 aa, synthetic construct
SAQYSRIGPNPAAQ

SEQ ID NO: 43176 - protein, 14 aa, synthetic construct
SAQYSRIGPNPAGE

SEQ ID NO: 43177 - protein, 14 aa, synthetic construct
SAQYSRIGPNPAHE

SEQ ID NO: 43178 - protein, 14 aa, synthetic construct
SAQYSRIGPNPAPE

SEQ ID NO: 43179 - protein, 14 aa, synthetic construct
SAQYSRIGPNPASE

SEQ ID NO: 43180 - protein, 14 aa, synthetic construct
SAQYSRIGPNPATE

SEQ ID NO: 43181 - protein, 14 aa, synthetic construct
SAQYSRIGPNPAVE

SEQ ID NO: 43182 - protein, 14 aa, synthetic construct
SAQYSRIGPNPEAE

SEQ ID NO: 43183 - protein, 14 aa, synthetic construct
SAQYSRIGPNPEAQ

SEQ ID NO: 43184 - protein, 14 aa, synthetic construct
SAQYSRIGPNPEFE

SEQ ID NO: 43185 - protein, 14 aa, synthetic construct
SAQYSRIGPNPEGE

SEQ ID NO: 43186 - protein, 14 aa, synthetic construct
SAQYSRIGPNPEPE

SEQ ID NO: 43187 - protein, 14 aa, synthetic construct
SAQYSRIGPNPETE

SEQ ID NO: 43188 - protein, 14 aa, synthetic construct
SAQYSRIGPNPEVE

SEQ ID NO: 43189 - protein, 14 aa, synthetic construct
SAQYSRIGPNPGAE

SEQ ID NO: 43190 - protein, 14 aa, synthetic construct
SAQYSRIGPNPGPE

SEQ ID NO: 43191 - protein, 14 aa, synthetic construct
SAQYSRIGPNPGTE

SEQ ID NO: 43192 - protein, 14 aa, synthetic construct
SAQYSRIGPNPGVE

SEQ ID NO: 43193 - protein, 14 aa, synthetic construct
SAQYSRIGPNPHAE

SEQ ID NO: 43194 - protein, 14 aa, synthetic construct
SAQYSRIGPNPHPE

SEQ ID NO: 43195 - protein, 14 aa, synthetic construct
SAQYSRIGPNPIAE

SEQ ID NO: 43196 - protein, 14 aa, synthetic construct
SAQYSRIGPNPIAQ

SEQ ID NO: 43197 - protein, 14 aa, synthetic construct
SAQYSRIGPNPIPE

SEQ ID NO: 43198 - protein, 14 aa, synthetic construct
SAQYSRIGPNPLAE

SEQ ID NO: 43199 - protein, 14 aa, synthetic construct
SAQYSRIGPNPLAQ

SEQ ID NO: 43200 - protein, 14 aa, synthetic construct
SAQYSRIGPNPLPE

SEQ ID NO: 43201 - protein, 14 aa, synthetic construct
SAQYSRIGPNPMAE

SEQ ID NO: 43202 - protein, 14 aa, synthetic construct
SAQYSRIGPNPMAQ

SEQ ID NO: 43203 - protein, 14 aa, synthetic construct
SAQYSRIGPNPMPE

SEQ ID NO: 43204 - protein, 14 aa, synthetic construct
SAQYSRIGPNPNAE

SEQ ID NO: 43205 - protein, 14 aa, synthetic construct
SAQYSRIGPNPNAQ

SEQ ID NO: 43206 - protein, 14 aa, synthetic construct
SAQYSRIGPNPNSE

SEQ ID NO: 43207 - protein, 14 aa, synthetic construct
SAQYSRIGPNPNTE

SEQ ID NO: 43208 - protein, 14 aa, synthetic construct
SAQYSRIGPNPNVE

SEQ ID NO: 43209 - protein, 14 aa, synthetic construct
SAQYSRIGPNPQAA

SEQ ID NO: 43210 - protein, 14 aa, synthetic construct
SAQYSRIGPNPQAC

SEQ ID NO: 43211 - protein, 14 aa, synthetic construct
SAQYSRIGPNPQAD

SEQ ID NO: 43212 - protein, 14 aa, synthetic construct
SAQYSRIGPNPQAE

SEQ ID NO: 43213 - protein, 14 aa, synthetic construct
SAQYSRIGPNPQAG

SEQ ID NO: 43214 - protein, 14 aa, synthetic construct
SAQYSRIGPNPQAI

SEQ ID NO: 43215 - protein, 14 aa, synthetic construct
SAQYSRIGPNPQAL

SEQ ID NO: 43216 - protein, 14 aa, synthetic construct
SAQYSRIGPNPQAM

SEQ ID NO: 43217 - protein, 14 aa, synthetic construct
SAQYSRIGPNPQAN

SEQ ID NO: 43218 - protein, 14 aa, synthetic construct
SAQYSRIGPNPQAQ

SEQ ID NO: 43219 - protein, 14 aa, synthetic construct
SAQYSRIGPNPQAS

SEQ ID NO: 43220 - protein, 14 aa, synthetic construct
SAQYSRIGPNPQAT

SEQ ID NO: 43221 - protein, 14 aa, synthetic construct
SAQYSRIGPNPQAV

SEQ ID NO: 43222 - protein, 14 aa, synthetic construct
SAQYSRIGPNPQAY

SEQ ID NO: 43223 - protein, 14 aa, synthetic construct
SAQYSRIGPNPQCQ

SEQ ID NO: 43224 - protein, 14 aa, synthetic construct
SAQYSRIGPNPQFE

SEQ ID NO: 43225 - protein, 14 aa, synthetic construct
SAQYSRIGPNPQFQ

SEQ ID NO: 43226 - protein, 14 aa, synthetic construct
SAQYSRIGPNPQGE

SEQ ID NO: 43227 - protein, 14 aa, synthetic construct
SAQYSRIGPNPQGQ

SEQ ID NO: 43228 - protein, 14 aa, synthetic construct
SAQYSRIGPNPQHE

SEQ ID NO: 43229 - protein, 14 aa, synthetic construct
SAQYSRIGPNPQHQ

SEQ ID NO: 43230 - protein, 14 aa, synthetic construct
SAQYSRIGPNPQIE

SEQ ID NO: 43231 - protein, 14 aa, synthetic construct
SAQYSRIGPNPQIQ

SEQ ID NO: 43232 - protein, 14 aa, synthetic construct
SAQYSRIGPNPQPE

SEQ ID NO: 43233 - protein, 14 aa, synthetic construct
SAQYSRIGPNPQPQ

SEQ ID NO: 43234 - protein, 14 aa, synthetic construct
SAQYSRIGPNPQQE

SEQ ID NO: 43235 - protein, 14 aa, synthetic construct
SAQYSRIGPNPQQQ

SEQ ID NO: 43236 - protein, 14 aa, synthetic construct
SAQYSRIGPNPQSE

SEQ ID NO: 43237 - protein, 14 aa, synthetic construct
SAQYSRIGPNPQSQ

SEQ ID NO: 43238 - protein, 14 aa, synthetic construct
SAQYSRIGPNPQTE

SEQ ID NO: 43239 - protein, 14 aa, synthetic construct
SAQYSRIGPNPQTQ

SEQ ID NO: 43240 - protein, 14 aa, synthetic construct
SAQYSRIGPNPQVE

SEQ ID NO: 43241 - protein, 14 aa, synthetic construct
SAQYSRIGPNPQVQ

SEQ ID NO: 43242 - protein, 14 aa, synthetic construct
SAQYSRIGPNPQWQ

SEQ ID NO: 43243 - protein, 14 aa, synthetic construct
SAQYSRIGPNPQYQ

SEQ ID NO: 43244 - protein, 14 aa, synthetic construct
SAQYSRIGPNPSAE

SEQ ID NO: 43245 - protein, 14 aa, synthetic construct
SAQYSRIGPNPSAQ

SEQ ID NO: 43246 - protein, 14 aa, synthetic construct
SAQYSRIGPNPSGE

SEQ ID NO: 43247 - protein, 14 aa, synthetic construct
SAQYSRIGPNPSHE

SEQ ID NO: 43248 - protein, 14 aa, synthetic construct
SAQYSRIGPNPSPE

SEQ ID NO: 43249 - protein, 14 aa, synthetic construct
SAQYSRIGPNPSSE

SEQ ID NO: 43250 - protein, 14 aa, synthetic construct
SAQYSRIGPNPSTE

SEQ ID NO: 43251 - protein, 14 aa, synthetic construct
SAQYSRIGPNPSVE

SEQ ID NO: 43252 - protein, 14 aa, synthetic construct
SAQYSRIGPNPTAE

SEQ ID NO: 43253 - protein, 14 aa, synthetic construct
SAQYSRIGPNPTAQ

SEQ ID NO: 43254 - protein, 14 aa, synthetic construct
SAQYSRIGPNPTGE

SEQ ID NO: 43255 - protein, 14 aa, synthetic construct
SAQYSRIGPNPTHE

SEQ ID NO: 43256 - protein, 14 aa, synthetic construct
SAQYSRIGPNPTPE

SEQ ID NO: 43257 - protein, 14 aa, synthetic construct
SAQYSRIGPNPTSE

SEQ ID NO: 43258 - protein, 14 aa, synthetic construct
SAQYSRIGPNPTTE

SEQ ID NO: 43259 - protein, 14 aa, synthetic construct
SAQYSRIGPNPTVE

SEQ ID NO: 43260 - protein, 14 aa, synthetic construct
SAQYSRIGPNPVAE

SEQ ID NO: 43261 - protein, 14 aa, synthetic construct
SAQYSRIGPNPVAQ

SEQ ID NO: 43262 - protein, 14 aa, synthetic construct
SAQYSRIGPNPVGE

SEQ ID NO: 43263 - protein, 14 aa, synthetic construct
SAQYSRIGPNPVHE

SEQ ID NO: 43264 - protein, 14 aa, synthetic construct
SAQYSRIGPNPVPE

SEQ ID NO: 43265 - protein, 14 aa, synthetic construct
SAQYSRIGPNPVQE

SEQ ID NO: 43266 - protein, 14 aa, synthetic construct
SAQYSRIGPNPVSE

SEQ ID NO: 43267 - protein, 14 aa, synthetic construct
SAQYSRIGPNPVVE

SEQ ID NO: 43268 - protein, 14 aa, synthetic construct
SAQYSRIGPNQMAQ

SEQ ID NO: 43269 - protein, 14 aa, synthetic construct
SAQYSRIGPNQQAL

SEQ ID NO: 43270 - protein, 14 aa, synthetic construct
SAQYSRIGPNQQAS

SEQ ID NO: 43271 - protein, 14 aa, synthetic construct
SAQYSRIGPNQQAT

SEQ ID NO: 43272 - protein, 14 aa, synthetic construct
SAQYSRIGPNQQAV

SEQ ID NO: 43273 - protein, 14 aa, synthetic construct
SAQYSRIGPNQQCQ

SEQ ID NO: 43274 - protein, 14 aa, synthetic construct
SAQYSRIGPNQQGQ

SEQ ID NO: 43275 - protein, 14 aa, synthetic construct
SAQYSRIGPNQQPQ

SEQ ID NO: 43276 - protein, 14 aa, synthetic construct
SAQYSRIGPNQQSQ

SEQ ID NO: 43277 - protein, 14 aa, synthetic construct
SAQYSRIGPNQQTQ

SEQ ID NO: 43278 - protein, 14 aa, synthetic construct
SAQYSRIGPNQQVQ

SEQ ID NO: 43279 - protein, 14 aa, synthetic construct
SAQYSRIGPNQTAQ

SEQ ID NO: 43280 - protein, 14 aa, synthetic construct
SAQYSRIGPNQTPE

SEQ ID NO: 43281 - protein, 14 aa, synthetic construct
SAQYSRIGPNQTSE

SEQ ID NO: 43282 - protein, 14 aa, synthetic construct
SAQYSRIGPNSMAQ

SEQ ID NO: 43283 - protein, 14 aa, synthetic construct
SAQYSRIGPNSPAQ

SEQ ID NO: 43284 - protein, 14 aa, synthetic construct
SAQYSRIGPNSQAA

SEQ ID NO: 43285 - protein, 14 aa, synthetic construct
SAQYSRIGPNSQAE

SEQ ID NO: 43286 - protein, 14 aa, synthetic construct
SAQYSRIGPNSQAG

SEQ ID NO: 43287 - protein, 14 aa, synthetic construct
SAQYSRIGPNSQAL

SEQ ID NO: 43288 - protein, 14 aa, synthetic construct
SAQYSRIGPNSQAM

SEQ ID NO: 43289 - protein, 14 aa, synthetic construct
SAQYSRIGPNSQAQ

SEQ ID NO: 43290 - protein, 14 aa, synthetic construct
SAQYSRIGPNSQAS

SEQ ID NO: 43291 - protein, 14 aa, synthetic construct
SAQYSRIGPNSQAT

SEQ ID NO: 43292 - protein, 14 aa, synthetic construct
SAQYSRIGPNSQCQ

SEQ ID NO: 43293 - protein, 14 aa, synthetic construct
SAQYSRIGPNSQGQ

SEQ ID NO: 43294 - protein, 14 aa, synthetic construct
SAQYSRIGPNSQSQ

SEQ ID NO: 43295 - protein, 14 aa, synthetic construct
SAQYSRIGPNSQTQ

SEQ ID NO: 43296 - protein, 14 aa, synthetic construct
SAQYSRIGPNSQVQ

SEQ ID NO: 43297 - protein, 14 aa, synthetic construct
SAQYSRIGPNSTAE

SEQ ID NO: 43298 - protein, 14 aa, synthetic construct
SAQYSRIGPNSTAQ

SEQ ID NO: 43299 - protein, 14 aa, synthetic construct
SAQYSRIGPNSTPE

SEQ ID NO: 43300 - protein, 14 aa, synthetic construct
SAQYSRIGPNSTSE

SEQ ID NO: 43301 - protein, 14 aa, synthetic construct
SAQYSRIGPNSTTE

SEQ ID NO: 43302 - protein, 14 aa, synthetic construct
SAQYSRIGPNSTVE

SEQ ID NO: 43303 - protein, 14 aa, synthetic construct
SAQYSRIGPNTPAQ

SEQ ID NO: 43304 - protein, 14 aa, synthetic construct
SAQYSRIGPNTQAT

SEQ ID NO: 43305 - protein, 14 aa, synthetic construct
SAQYSRIGPNTQCQ

SEQ ID NO: 43306 - protein, 14 aa, synthetic construct
SAQYSRIGPNTQGQ

SEQ ID NO: 43307 - protein, 14 aa, synthetic construct
SAQYSRIGPNTQSQ

SEQ ID NO: 43308 - protein, 14 aa, synthetic construct
SAQYSRIGPNTQTQ

SEQ ID NO: 43309 - protein, 14 aa, synthetic construct
SAQYSRIGPNTTSE

SEQ ID NO: 43310 - protein, 14 aa, synthetic construct
SAQYSRIGPNTTTE

SEQ ID NO: 43311 - protein, 14 aa, synthetic construct
SAQYSRIGPNVQAS

SEQ ID NO: 43312 - protein, 14 aa, synthetic construct
SAQYSRIGPNVQAT

SEQ ID NO: 43313 - protein, 14 aa, synthetic construct
SAQYSRIGPNVQCQ

SEQ ID NO: 43314 - protein, 14 aa, synthetic construct
SAQYSRIGPNVQTQ

SEQ ID NO: 43315 - protein, 14 aa, synthetic construct
SAQYSRIGPNVTAE

SEQ ID NO: 43316 - protein, 14 aa, synthetic construct
SAQYSRIGPNVTAQ

SEQ ID NO: 43317 - protein, 14 aa, synthetic construct
SAQYSRIGPNVTSE

SEQ ID NO: 43318 - protein, 14 aa, synthetic construct
SAQYSRIGPNVTTE

SEQ ID NO: 43319 - protein, 14 aa, synthetic construct
SAQYSRIGPNYAAQ

SEQ ID NO: 43320 - protein, 14 aa, synthetic construct
SAQYSRIGPNYDAQ

SEQ ID NO: 43321 - protein, 14 aa, synthetic construct
SAQYSRIGPNYEAQ

SEQ ID NO: 43322 - protein, 14 aa, synthetic construct
SAQYSRIGPNYPAQ

SEQ ID NO: 43323 - protein, 14 aa, synthetic construct
SAQYSRIGPNYQAA

SEQ ID NO: 43324 - protein, 14 aa, synthetic construct
SAQYSRIGPNYQAD

SEQ ID NO: 43325 - protein, 14 aa, synthetic construct
SAQYSRIGPNYQAE

SEQ ID NO: 43326 - protein, 14 aa, synthetic construct
SAQYSRIGPNYQAG

SEQ ID NO: 43327 - protein, 14 aa, synthetic construct
SAQYSRIGPNYQAL

SEQ ID NO: 43328 - protein, 14 aa, synthetic construct
SAQYSRIGPNYQAM

SEQ ID NO: 43329 - protein, 14 aa, synthetic construct
SAQYSRIGPNYQAN

SEQ ID NO: 43330 - protein, 14 aa, synthetic construct
SAQYSRIGPNYQAQ

SEQ ID NO: 43331 - protein, 14 aa, synthetic construct
SAQYSRIGPNYQAS

SEQ ID NO: 43332 - protein, 14 aa, synthetic construct
SAQYSRIGPNYQAT

SEQ ID NO: 43333 - protein, 14 aa, synthetic construct
SAQYSRIGPNYQCQ

SEQ ID NO: 43334 - protein, 14 aa, synthetic construct
SAQYSRIGPNYQPQ

SEQ ID NO: 43335 - protein, 14 aa, synthetic construct
SAQYSRIGPNYQSQ

SEQ ID NO: 43336 - protein, 14 aa, synthetic construct
SAQYSRIGPNYQTQ

SEQ ID NO: 43337 - protein, 14 aa, synthetic construct
SAQYSRIGPNYSAQ

SEQ ID NO: 43338 - protein, 14 aa, synthetic construct
SAQYSRIGPNYTAQ

SEQ ID NO: 43339 - protein, 14 aa, synthetic construct
SCQYSRIGPNAPAQ

SEQ ID NO: 43340 - protein, 14 aa, synthetic construct
SCQYSRIGPNAQAE

SEQ ID NO: 43341 - protein, 14 aa, synthetic construct
SCQYSRIGPNAQAT

SEQ ID NO: 43342 - protein, 14 aa, synthetic construct
SCQYSRIGPNDQAQ

SEQ ID NO: 43343 - protein, 14 aa, synthetic construct
SCQYSRIGPNIQAQ

SEQ ID NO: 43344 - protein, 14 aa, synthetic construct
SCQYSRIGPNNQAQ

SEQ ID NO: 43345 - protein, 14 aa, synthetic construct
SCQYSRIGPNPQAQ

SEQ ID NO: 43346 - protein, 14 aa, synthetic construct
SFQYSRIGPNAAAQ

SEQ ID NO: 43347 - protein, 14 aa, synthetic construct
SFQYSRIGPNAMAQ

SEQ ID NO: 43348 - protein, 14 aa, synthetic construct
SFQYSRIGPNANAQ

SEQ ID NO: 43349 - protein, 14 aa, synthetic construct
SFQYSRIGPNAPAQ

SEQ ID NO: 43350 - protein, 14 aa, synthetic construct
SFQYSRIGPNAQAA

SEQ ID NO: 43351 - protein, 14 aa, synthetic construct
SFQYSRIGPNAQAE

SEQ ID NO: 43352 - protein, 14 aa, synthetic construct
SFQYSRIGPNAQAG

SEQ ID NO: 43353 - protein, 14 aa, synthetic construct
SFQYSRIGPNAQAL

SEQ ID NO: 43354 - protein, 14 aa, synthetic construct
SFQYSRIGPNAQAM

SEQ ID NO: 43355 - protein, 14 aa, synthetic construct
SFQYSRIGPNAQAQ

SEQ ID NO: 43356 - protein, 14 aa, synthetic construct
SFQYSRIGPNAQAS

SEQ ID NO: 43357 - protein, 14 aa, synthetic construct
SFQYSRIGPNAQAT

SEQ ID NO: 43358 - protein, 14 aa, synthetic construct
SFQYSRIGPNAQSQ

SEQ ID NO: 43359 - protein, 14 aa, synthetic construct
SFQYSRIGPNASAQ

SEQ ID NO: 43360 - protein, 14 aa, synthetic construct
SFQYSRIGPNATAQ

SEQ ID NO: 43361 - protein, 14 aa, synthetic construct
SFQYSRIGPNDQAQ

SEQ ID NO: 43362 - protein, 14 aa, synthetic construct
SFQYSRIGPNEQAQ

SEQ ID NO: 43363 - protein, 14 aa, synthetic construct
SFQYSRIGPNETAE

SEQ ID NO: 43364 - protein, 14 aa, synthetic construct
SFQYSRIGPNFQAQ

SEQ ID NO: 43365 - protein, 14 aa, synthetic construct
SFQYSRIGPNIQAQ

SEQ ID NO: 43366 - protein, 14 aa, synthetic construct
SFQYSRIGPNNQAQ

SEQ ID NO: 43367 - protein, 14 aa, synthetic construct
SFQYSRIGPNPQAQ

SEQ ID NO: 43368 - protein, 14 aa, synthetic construct
SFQYSRIGPNQQAQ

SEQ ID NO: 43369 - protein, 14 aa, synthetic construct
SFQYSRIGPNYQAQ

SEQ ID NO: 43370 - protein, 14 aa, synthetic construct
SIQYSRIGPNAEAQ

SEQ ID NO: 43371 - protein, 14 aa, synthetic construct
SIQYSRIGPNAMAQ

SEQ ID NO: 43372 - protein, 14 aa, synthetic construct
SIQYSRIGPNAPAQ

SEQ ID NO: 43373 - protein, 14 aa, synthetic construct
SIQYSRIGPNAQAA

SEQ ID NO: 43374 - protein, 14 aa, synthetic construct
SIQYSRIGPNAQAD

SEQ ID NO: 43375 - protein, 14 aa, synthetic construct
SIQYSRIGPNAQAE

SEQ ID NO: 43376 - protein, 14 aa, synthetic construct
SIQYSRIGPNAQAQ

SEQ ID NO: 43377 - protein, 14 aa, synthetic construct
SIQYSRIGPNAQAS

SEQ ID NO: 43378 - protein, 14 aa, synthetic construct
SIQYSRIGPNAQAT

SEQ ID NO: 43379 - protein, 14 aa, synthetic construct
SIQYSRIGPNAQSQ

SEQ ID NO: 43380 - protein, 14 aa, synthetic construct
SIQYSRIGPNDQAQ

SEQ ID NO: 43381 - protein, 14 aa, synthetic construct
SIQYSRIGPNDTAE

SEQ ID NO: 43382 - protein, 14 aa, synthetic construct
SIQYSRIGPNEQAQ

SEQ ID NO: 43383 - protein, 14 aa, synthetic construct
SIQYSRIGPNETAE

SEQ ID NO: 43384 - protein, 14 aa, synthetic construct
SIQYSRIGPNGQAQ

SEQ ID NO: 43385 - protein, 14 aa, synthetic construct
SIQYSRIGPNNQAQ

SEQ ID NO: 43386 - protein, 14 aa, synthetic construct
SIQYSRIGPNPEAE

SEQ ID NO: 43387 - protein, 14 aa, synthetic construct
SIQYSRIGPNPQAQ

SEQ ID NO: 43388 - protein, 14 aa, synthetic construct
SIQYSRIGPNQQAQ

SEQ ID NO: 43389 - protein, 14 aa, synthetic construct
SKQYSRIGPNDQAQ

SEQ ID NO: 43390 - protein, 14 aa, synthetic construct
SKQYSRIGPNEQAQ

SEQ ID NO: 43391 - protein, 14 aa, synthetic construct
SLQYSRIGPNAPAQ

SEQ ID NO: 43392 - protein, 14 aa, synthetic construct
SLQYSRIGPNAQAA

SEQ ID NO: 43393 - protein, 14 aa, synthetic construct
SLQYSRIGPNAQAL

SEQ ID NO: 43394 - protein, 14 aa, synthetic construct
SLQYSRIGPNAQAQ

SEQ ID NO: 43395 - protein, 14 aa, synthetic construct
SLQYSRIGPNAQAS

SEQ ID NO: 43396 - protein, 14 aa, synthetic construct
SLQYSRIGPNAQAT

SEQ ID NO: 43397 - protein, 14 aa, synthetic construct
SLQYSRIGPNDQAQ

SEQ ID NO: 43398 - protein, 14 aa, synthetic construct
SLQYSRIGPNEQAQ

SEQ ID NO: 43399 - protein, 14 aa, synthetic construct
SLQYSRIGPNGQAQ

SEQ ID NO: 43400 - protein, 14 aa, synthetic construct
SLQYSRIGPNNQAQ

SEQ ID NO: 43401 - protein, 14 aa, synthetic construct
SLQYSRIGPNPQAQ

SEQ ID NO: 43402 - protein, 14 aa, synthetic construct
SLQYSRIGPNQQAQ

SEQ ID NO: 43403 - protein, 14 aa, synthetic construct
SLQYSRIGPNSQAQ

SEQ ID NO: 43404 - protein, 14 aa, synthetic construct
SMQYSRIGPNAAAQ

SEQ ID NO: 43405 - protein, 14 aa, synthetic construct
SMQYSRIGPNADAQ

SEQ ID NO: 43406 - protein, 14 aa, synthetic construct
SMQYSRIGPNAMAQ

SEQ ID NO: 43407 - protein, 14 aa, synthetic construct
SMQYSRIGPNANAQ

SEQ ID NO: 43408 - protein, 14 aa, synthetic construct
SMQYSRIGPNAPAQ

SEQ ID NO: 43409 - protein, 14 aa, synthetic construct
SMQYSRIGPNAQAA

SEQ ID NO: 43410 - protein, 14 aa, synthetic construct
SMQYSRIGPNAQAD

SEQ ID NO: 43411 - protein, 14 aa, synthetic construct
SMQYSRIGPNAQAE

SEQ ID NO: 43412 - protein, 14 aa, synthetic construct
SMQYSRIGPNAQAG

SEQ ID NO: 43413 - protein, 14 aa, synthetic construct
SMQYSRIGPNAQAL

SEQ ID NO: 43414 - protein, 14 aa, synthetic construct
SMQYSRIGPNAQAM

SEQ ID NO: 43415 - protein, 14 aa, synthetic construct
SMQYSRIGPNAQAN

SEQ ID NO: 43416 - protein, 14 aa, synthetic construct
SMQYSRIGPNAQAQ

SEQ ID NO: 43417 - protein, 14 aa, synthetic construct
SMQYSRIGPNAQAS

SEQ ID NO: 43418 - protein, 14 aa, synthetic construct
SMQYSRIGPNAQAT

SEQ ID NO: 43419 - protein, 14 aa, synthetic construct
SMQYSRIGPNAQAV

SEQ ID NO: 43420 - protein, 14 aa, synthetic construct
SMQYSRIGPNAQCQ

SEQ ID NO: 43421 - protein, 14 aa, synthetic construct
SMQYSRIGPNAQPQ

SEQ ID NO: 43422 - protein, 14 aa, synthetic construct
SMQYSRIGPNAQSQ

SEQ ID NO: 43423 - protein, 14 aa, synthetic construct
SMQYSRIGPNAQVQ

SEQ ID NO: 43424 - protein, 14 aa, synthetic construct
SMQYSRIGPNASAQ

SEQ ID NO: 43425 - protein, 14 aa, synthetic construct
SMQYSRIGPNATAQ

SEQ ID NO: 43426 - protein, 14 aa, synthetic construct
SMQYSRIGPNDQAQ

SEQ ID NO: 43427 - protein, 14 aa, synthetic construct
SMQYSRIGPNEQAQ

SEQ ID NO: 43428 - protein, 14 aa, synthetic construct
SMQYSRIGPNFQAQ

SEQ ID NO: 43429 - protein, 14 aa, synthetic construct
SMQYSRIGPNHQAQ

SEQ ID NO: 43430 - protein, 14 aa, synthetic construct
SMQYSRIGPNIQAQ

SEQ ID NO: 43431 - protein, 14 aa, synthetic construct
SMQYSRIGPNNQAQ

SEQ ID NO: 43432 - protein, 14 aa, synthetic construct
SMQYSRIGPNNTAE

SEQ ID NO: 43433 - protein, 14 aa, synthetic construct
SMQYSRIGPNPEAE

SEQ ID NO: 43434 - protein, 14 aa, synthetic construct
SMQYSRIGPNPQAE

SEQ ID NO: 43435 - protein, 14 aa, synthetic construct
SMQYSRIGPNPQAQ

SEQ ID NO: 43436 - protein, 14 aa, synthetic construct
SMQYSRIGPNPQPE

SEQ ID NO: 43437 - protein, 14 aa, synthetic construct
SMQYSRIGPNPVAE

SEQ ID NO: 43438 - protein, 14 aa, synthetic construct
SMQYSRIGPNQQAQ

SEQ ID NO: 43439 - protein, 14 aa, synthetic construct
SMQYSRIGPNSQAQ

SEQ ID NO: 43440 - protein, 14 aa, synthetic construct
SMQYSRIGPNYQAQ

SEQ ID NO: 43441 - protein, 14 aa, synthetic construct
SPQYSRIGPNAAAQ

SEQ ID NO: 43442 - protein, 14 aa, synthetic construct
SPQYSRIGPNAEAQ

SEQ ID NO: 43443 - protein, 14 aa, synthetic construct
SPQYSRIGPNAIAQ

SEQ ID NO: 43444 - protein, 14 aa, synthetic construct
SPQYSRIGPNAMAQ

SEQ ID NO: 43445 - protein, 14 aa, synthetic construct
SPQYSRIGPNANAQ

SEQ ID NO: 43446 - protein, 14 aa, synthetic construct
SPQYSRIGPNAPAQ

SEQ ID NO: 43447 - protein, 14 aa, synthetic construct
SPQYSRIGPNAQAA

SEQ ID NO: 43448 - protein, 14 aa, synthetic construct
SPQYSRIGPNAQAD

SEQ ID NO: 43449 - protein, 14 aa, synthetic construct
SPQYSRIGPNAQAE

SEQ ID NO: 43450 - protein, 14 aa, synthetic construct
SPQYSRIGPNAQAG

SEQ ID NO: 43451 - protein, 14 aa, synthetic construct
SPQYSRIGPNAQAI

SEQ ID NO: 43452 - protein, 14 aa, synthetic construct
SPQYSRIGPNAQAL

SEQ ID NO: 43453 - protein, 14 aa, synthetic construct
SPQYSRIGPNAQAM

SEQ ID NO: 43454 - protein, 14 aa, synthetic construct
SPQYSRIGPNAQAN

SEQ ID NO: 43455 - protein, 14 aa, synthetic construct
SPQYSRIGPNAQAQ

SEQ ID NO: 43456 - protein, 14 aa, synthetic construct
SPQYSRIGPNAQAS

SEQ ID NO: 43457 - protein, 14 aa, synthetic construct
SPQYSRIGPNAQAT

SEQ ID NO: 43458 - protein, 14 aa, synthetic construct
SPQYSRIGPNAQAV

SEQ ID NO: 43459 - protein, 14 aa, synthetic construct
SPQYSRIGPNAQAY

SEQ ID NO: 43460 - protein, 14 aa, synthetic construct
SPQYSRIGPNAQCQ

SEQ ID NO: 43461 - protein, 14 aa, synthetic construct
SPQYSRIGPNAQPQ

SEQ ID NO: 43462 - protein, 14 aa, synthetic construct
SPQYSRIGPNAQSQ

SEQ ID NO: 43463 - protein, 14 aa, synthetic construct
SPQYSRIGPNAQVQ

SEQ ID NO: 43464 - protein, 14 aa, synthetic construct
SPQYSRIGPNASAQ

SEQ ID NO: 43465 - protein, 14 aa, synthetic construct
SPQYSRIGPNATAE

SEQ ID NO: 43466 - protein, 14 aa, synthetic construct
SPQYSRIGPNATAQ

SEQ ID NO: 43467 - protein, 14 aa, synthetic construct
SPQYSRIGPNATPE

SEQ ID NO: 43468 - protein, 14 aa, synthetic construct
SPQYSRIGPNCQAQ

SEQ ID NO: 43469 - protein, 14 aa, synthetic construct
SPQYSRIGPNDQAQ

SEQ ID NO: 43470 - protein, 14 aa, synthetic construct
SPQYSRIGPNDTAE

SEQ ID NO: 43471 - protein, 14 aa, synthetic construct
SPQYSRIGPNEQAQ

SEQ ID NO: 43472 - protein, 14 aa, synthetic construct
SPQYSRIGPNETAE

SEQ ID NO: 43473 - protein, 14 aa, synthetic construct
SPQYSRIGPNGQAQ

SEQ ID NO: 43474 - protein, 14 aa, synthetic construct
SPQYSRIGPNIQAQ

SEQ ID NO: 43475 - protein, 14 aa, synthetic construct
SPQYSRIGPNLQAQ

SEQ ID NO: 43476 - protein, 14 aa, synthetic construct
SPQYSRIGPNMQAQ

SEQ ID NO: 43477 - protein, 14 aa, synthetic construct
SPQYSRIGPNNEAA

SEQ ID NO: 43478 - protein, 14 aa, synthetic construct
SPQYSRIGPNNQAQ

SEQ ID NO: 43479 - protein, 14 aa, synthetic construct
SPQYSRIGPNNTAE

SEQ ID NO: 43480 - protein, 14 aa, synthetic construct
SPQYSRIGPNPEAE

SEQ ID NO: 43481 - protein, 14 aa, synthetic construct
SPQYSRIGPNPQAE

SEQ ID NO: 43482 - protein, 14 aa, synthetic construct
SPQYSRIGPNPQAQ

SEQ ID NO: 43483 - protein, 14 aa, synthetic construct
SPQYSRIGPNPQPE

SEQ ID NO: 43484 - protein, 14 aa, synthetic construct
SPQYSRIGPNPQVE

SEQ ID NO: 43485 - protein, 14 aa, synthetic construct
SPQYSRIGPNPTAE

SEQ ID NO: 43486 - protein, 14 aa, synthetic construct
SPQYSRIGPNQQAQ

SEQ ID NO: 43487 - protein, 14 aa, synthetic construct
SPQYSRIGPNQTAE

SEQ ID NO: 43488 - protein, 14 aa, synthetic construct
SPQYSRIGPNSQAQ

SEQ ID NO: 43489 - protein, 14 aa, synthetic construct
SPQYSRIGPNSTAE

SEQ ID NO: 43490 - protein, 14 aa, synthetic construct
SPQYSRIGPNTQAQ

SEQ ID NO: 43491 - protein, 14 aa, synthetic construct
SPQYSRIGPNTTAE

SEQ ID NO: 43492 - protein, 14 aa, synthetic construct
SPQYSRIGPNVQAQ

SEQ ID NO: 43493 - protein, 14 aa, synthetic construct
SPQYSRIGPNVTAE

SEQ ID NO: 43494 - protein, 14 aa, synthetic construct
SPQYSRIGPNYQAQ

SEQ ID NO: 43495 - protein, 14 aa, synthetic construct
SQQYSRIGPNATAQ

SEQ ID NO: 43496 - protein, 14 aa, synthetic construct
SQQYSRIGPNAVAQ

SEQ ID NO: 43497 - protein, 14 aa, synthetic construct
SQQYSRIGPNNQAQ

SEQ ID NO: 43498 - protein, 14 aa, synthetic construct
SQQYSRIGPNNTAE

SEQ ID NO: 43499 - protein, 14 aa, synthetic construct
SQQYSRIGPNPIAE

SEQ ID NO: 43500 - protein, 14 aa, synthetic construct
SQQYSRIGPNPLAE

SEQ ID NO: 43501 - protein, 14 aa, synthetic construct
SQQYSRIGPNPMAE

SEQ ID NO: 43502 - protein, 14 aa, synthetic construct
SQQYSRIGPNPQAE

SEQ ID NO: 43503 - protein, 14 aa, synthetic construct
SQQYSRIGPNPQAQ

SEQ ID NO: 43504 - protein, 14 aa, synthetic construct
SQQYSRIGPNPQPE

SEQ ID NO: 43505 - protein, 14 aa, synthetic construct
SQQYSRIGPNPQSE

SEQ ID NO: 43506 - protein, 14 aa, synthetic construct
SQQYSRIGPNPQTE

SEQ ID NO: 43507 - protein, 14 aa, synthetic construct
SQQYSRIGPNPQVE

SEQ ID NO: 43508 - protein, 14 aa, synthetic construct
SQQYSRIGPNPTAE

SEQ ID NO: 43509 - protein, 14 aa, synthetic construct
SQQYSRIGPNPVAE

SEQ ID NO: 43510 - protein, 14 aa, synthetic construct
SQQYSRIGPNYQAQ

SEQ ID NO: 43511 - protein, 14 aa, synthetic construct
STQYSRIGPNAQAT

SEQ ID NO: 43512 - protein, 14 aa, synthetic construct
STQYSRIGPNATAQ

SEQ ID NO: 43513 - protein, 14 aa, synthetic construct
STQYSRIGPNHQAQ

SEQ ID NO: 43514 - protein, 14 aa, synthetic construct
STQYSRIGPNHTAE

SEQ ID NO: 43515 - protein, 14 aa, synthetic construct
STQYSRIGPNNEAA

SEQ ID NO: 43516 - protein, 14 aa, synthetic construct
STQYSRIGPNNQAQ

SEQ ID NO: 43517 - protein, 14 aa, synthetic construct
STQYSRIGPNNTAE

SEQ ID NO: 43518 - protein, 14 aa, synthetic construct
STQYSRIGPNPAAE

SEQ ID NO: 43519 - protein, 14 aa, synthetic construct
STQYSRIGPNPEAE

SEQ ID NO: 43520 - protein, 14 aa, synthetic construct
STQYSRIGPNPMAE

SEQ ID NO: 43521 - protein, 14 aa, synthetic construct
STQYSRIGPNPQAE

SEQ ID NO: 43522 - protein, 14 aa, synthetic construct
STQYSRIGPNPQAQ

SEQ ID NO: 43523 - protein, 14 aa, synthetic construct
STQYSRIGPNPQSE

SEQ ID NO: 43524 - protein, 14 aa, synthetic construct
STQYSRIGPNPQTE

SEQ ID NO: 43525 - protein, 14 aa, synthetic construct
STQYSRIGPNPQVE

SEQ ID NO: 43526 - protein, 14 aa, synthetic construct
STQYSRIGPNPSAE

SEQ ID NO: 43527 - protein, 14 aa, synthetic construct
STQYSRIGPNPTAE

SEQ ID NO: 43528 - protein, 14 aa, synthetic construct
STQYSRIGPNYQAQ

SEQ ID NO: 43529 - protein, 14 aa, synthetic construct
SVQYSRIGPNAAAQ

SEQ ID NO: 43530 - protein, 14 aa, synthetic construct
SVQYSRIGPNADAQ

SEQ ID NO: 43531 - protein, 14 aa, synthetic construct
SVQYSRIGPNAEAQ

SEQ ID NO: 43532 - protein, 14 aa, synthetic construct
SVQYSRIGPNAMAQ

SEQ ID NO: 43533 - protein, 14 aa, synthetic construct
SVQYSRIGPNAPAQ

SEQ ID NO: 43534 - protein, 14 aa, synthetic construct
SVQYSRIGPNAQAA

SEQ ID NO: 43535 - protein, 14 aa, synthetic construct
SVQYSRIGPNAQAD

SEQ ID NO: 43536 - protein, 14 aa, synthetic construct
SVQYSRIGPNAQAE

SEQ ID NO: 43537 - protein, 14 aa, synthetic construct
SVQYSRIGPNAQAG

SEQ ID NO: 43538 - protein, 14 aa, synthetic construct
SVQYSRIGPNAQAQ

SEQ ID NO: 43539 - protein, 14 aa, synthetic construct
SVQYSRIGPNAQAS

SEQ ID NO: 43540 - protein, 14 aa, synthetic construct
SVQYSRIGPNAQAT

SEQ ID NO: 43541 - protein, 14 aa, synthetic construct
SVQYSRIGPNAQPQ

SEQ ID NO: 43542 - protein, 14 aa, synthetic construct
SVQYSRIGPNAQSQ

SEQ ID NO: 43543 - protein, 14 aa, synthetic construct
SVQYSRIGPNAQTQ

SEQ ID NO: 43544 - protein, 14 aa, synthetic construct
SVQYSRIGPNATAE

SEQ ID NO: 43545 - protein, 14 aa, synthetic construct
SVQYSRIGPNATPE

SEQ ID NO: 43546 - protein, 14 aa, synthetic construct
SVQYSRIGPNDQAQ

SEQ ID NO: 43547 - protein, 14 aa, synthetic construct
SVQYSRIGPNDTAE

SEQ ID NO: 43548 - protein, 14 aa, synthetic construct
SVQYSRIGPNEQAQ

SEQ ID NO: 43549 - protein, 14 aa, synthetic construct
SVQYSRIGPNIQAQ

SEQ ID NO: 43550 - protein, 14 aa, synthetic construct
SVQYSRIGPNNQAQ

SEQ ID NO: 43551 - protein, 14 aa, synthetic construct
SVQYSRIGPNPEAE

SEQ ID NO: 43552 - protein, 14 aa, synthetic construct
SVQYSRIGPNPQAQ

SEQ ID NO: 43553 - protein, 14 aa, synthetic construct
SVQYSRIGPNPQPE

SEQ ID NO: 43554 - protein, 14 aa, synthetic construct
SVQYSRIGPNQQAQ

SEQ ID NO: 43555 - protein, 14 aa, synthetic construct
SYQYSRIGPNAPAQ

SEQ ID NO: 43556 - protein, 14 aa, synthetic construct
SYQYSRIGPNAQAT

SEQ ID NO: 43557 - protein, 14 aa, synthetic construct
SYQYSRIGPNATAQ

SEQ ID NO: 43558 - protein, 14 aa, synthetic construct
SYQYSRIGPNDQAQ

SEQ ID NO: 43559 - protein, 14 aa, synthetic construct
SYQYSRIGPNNQAQ

SEQ ID NO: 43560 - protein, 14 aa, synthetic construct
SYQYSRIGPNPQAQ

SEQ ID NO: 43561 - protein, 14 aa, synthetic construct
SYQYSRIGPNQQAQ

SEQ ID NO: 43562 - protein, 14 aa, synthetic construct
TAQYSRIGPNATAQ

SEQ ID NO: 43563 - protein, 14 aa, synthetic construct
TAQYSRIGPNHQAQ

SEQ ID NO: 43564 - protein, 14 aa, synthetic construct
TAQYSRIGPNHTAE

SEQ ID NO: 43565 - protein, 14 aa, synthetic construct
TAQYSRIGPNIQAQ

SEQ ID NO: 43566 - protein, 14 aa, synthetic construct
TAQYSRIGPNITAE

SEQ ID NO: 43567 - protein, 14 aa, synthetic construct
TAQYSRIGPNLQAQ

SEQ ID NO: 43568 - protein, 14 aa, synthetic construct
TAQYSRIGPNNQAQ

SEQ ID NO: 43569 - protein, 14 aa, synthetic construct
TAQYSRIGPNNTAE

SEQ ID NO: 43570 - protein, 14 aa, synthetic construct
TAQYSRIGPNPIAE

SEQ ID NO: 43571 - protein, 14 aa, synthetic construct
TAQYSRIGPNPQAQ

SEQ ID NO: 43572 - protein, 14 aa, synthetic construct
TAQYSRIGPNPVAE

SEQ ID NO: 43573 - protein, 14 aa, synthetic construct
TAQYSRIGPNYQAQ

SEQ ID NO: 43574 - protein, 14 aa, synthetic construct
TPQYSRIGPNAQAQ

SEQ ID NO: 43575 - protein, 14 aa, synthetic construct
TPQYSRIGPNATAE

SEQ ID NO: 43576 - protein, 14 aa, synthetic construct
TQQYSRIGPNPQAE

SEQ ID NO: 43577 - protein, 14 aa, synthetic construct
VAQYSRIGPNAPAQ

SEQ ID NO: 43578 - protein, 14 aa, synthetic construct
VAQYSRIGPNEQAQ

SEQ ID NO: 43579 - protein, 14 aa, synthetic construct
VAQYSRIGPNHQAQ

SEQ ID NO: 43580 - protein, 14 aa, synthetic construct
VAQYSRIGPNIQAQ

SEQ ID NO: 43581 - protein, 14 aa, synthetic construct
VAQYSRIGPNLQAQ

SEQ ID NO: 43582 - protein, 14 aa, synthetic construct
VAQYSRIGPNMQAQ

SEQ ID NO: 43583 - protein, 14 aa, synthetic construct
VAQYSRIGPNNQAQ

SEQ ID NO: 43584 - protein, 14 aa, synthetic construct
VAQYSRIGPNPQAQ

SEQ ID NO: 43585 - protein, 14 aa, synthetic construct
VAQYSRIGPNQQAQ

SEQ ID NO: 43586 - protein, 14 aa, synthetic construct
VAQYSRIGPNVQAQ

SEQ ID NO: 43587 - protein, 14 aa, synthetic construct
VAQYSRIGPNYQAQ

SEQ ID NO: 43588 - protein, 14 aa, synthetic construct
WAQYSRIGPNDQAQ

SEQ ID NO: 43589 - protein, 14 aa, synthetic construct
YAQYSRIGPNAPAQ

SEQ ID NO: 43590 - protein, 14 aa, synthetic construct
EAQYSRIGANNQAQ

SEQ ID NO: 43591 - protein, 14 aa, synthetic construct
EAQYSRIGVNNQAQ

SEQ ID NO: 43592 - protein, 14 aa, synthetic construct
EAQYSRVGPNNQAQ

SEQ ID NO: 43593 - protein, 14 aa, synthetic construct
SAQHSRIGPNNQAT

SEQ ID NO: 43594 - protein, 14 aa, synthetic construct
SAQHSRIGPNPQAE

SEQ ID NO: 43595 - protein, 14 aa, synthetic construct
SAQYSKIGPNNQAT

SEQ ID NO: 43596 - protein, 14 aa, synthetic construct
SAQYSRIGANPQAE

SEQ ID NO: 43597 - protein, 14 aa, synthetic construct
SAQYSRIGINPQAE

SEQ ID NO: 43598 - protein, 14 aa, synthetic construct
SAQYSRIGPDNQAT

SEQ ID NO: 43599 - protein, 14 aa, synthetic construct
SAQYSRIGPDPQAE

SEQ ID NO: 43600 - protein, 14 aa, synthetic construct
SAQYSRLGPNATAE

SEQ ID NO: 43601 - protein, 14 aa, synthetic construct
SAQYSRLGPNPQAE

SEQ ID NO: 43602 - protein, 14 aa, synthetic construct
SAQYSRVGPNATAE

SEQ ID NO: 43603 - protein, 14 aa, synthetic construct
SAQYSRVGPNNQAT

SEQ ID NO: 43604 - protein, 14 aa, synthetic construct
SAQYSRVGPNPQAE

SEQ ID NO: 43605 - protein, 14 aa, synthetic construct
SFQYSRNSDNATAQ

SEQ ID NO: 43606 - protein, 14 aa, synthetic construct
SVQYSRNSDNHQAQ

SEQ ID NO: 43607 - protein, 14 aa, synthetic construct
SVQYSRNSDNNQAQ

SEQ ID NO: 43608 - protein, 14 aa, synthetic construct
SVQYSRNSDNPQAQ

SEQ ID NO: 43609 - protein, 14 aa, synthetic construct
WIQYSRNSDNAQAQ

SEQ ID NO: 43610 - protein, 14 aa, synthetic construct
WVQYSRNSDNAQAQ

SEQ ID NO: 43611 - protein, 14 aa, synthetic construct
AAQLHRLGPNAQAE

SEQ ID NO: 43612 - protein, 14 aa, synthetic construct
LAQLHRLGPNAQAE

SEQ ID NO: 43613 - protein, 14 aa, synthetic construct
MAQLHRLGPNAQAD

SEQ ID NO: 43614 - protein, 14 aa, synthetic construct
MAQLHRLGPNAQAE

SEQ ID NO: 43615 - protein, 14 aa, synthetic construct
SAQLHRLGPNAQAD

SEQ ID NO: 43616 - protein, 14 aa, synthetic construct
SAQLHRLGPNAQAE

SEQ ID NO: 43617 - protein, 14 aa, synthetic construct
SAQLHRLGPNAQHE

SEQ ID NO: 43618 - protein, 14 aa, synthetic construct
SAQLHRLGPNAQIE

SEQ ID NO: 43619 - protein, 14 aa, synthetic construct
SAQLHRLGPNAQPD

SEQ ID NO: 43620 - protein, 14 aa, synthetic construct
SAQLHRLGPNAQPE

SEQ ID NO: 43621 - protein, 14 aa, synthetic construct
SAQLHRLGPNAQPL

SEQ ID NO: 43622 - protein, 14 aa, synthetic construct
SAQLHRLGPNAQPM

SEQ ID NO: 43623 - protein, 14 aa, synthetic construct
SAQLHRLGPNAQPQ

SEQ ID NO: 43624 - protein, 14 aa, synthetic construct
SAQLHRLGPNAQPT

SEQ ID NO: 43625 - protein, 14 aa, synthetic construct
SAQLHRLGPNAQSD

SEQ ID NO: 43626 - protein, 14 aa, synthetic construct
SAQLHRLGPNAQSE

SEQ ID NO: 43627 - protein, 14 aa, synthetic construct
SAQLHRLGPNAQTD

SEQ ID NO: 43628 - protein, 14 aa, synthetic construct
SAQLHRLGPNAQTE

SEQ ID NO: 43629 - protein, 14 aa, synthetic construct
SAQLHRLGPNAQVE

SEQ ID NO: 43630 - protein, 14 aa, synthetic construct
SAQLHRLGPNEQPQ

SEQ ID NO: 43631 - protein, 14 aa, synthetic construct
SAQLHRLGPNEQTQ

SEQ ID NO: 43632 - protein, 14 aa, synthetic construct
SAQLHRLGPNFQAD

SEQ ID NO: 43633 - protein, 14 aa, synthetic construct
SAQLHRLGPNHQAE

SEQ ID NO: 43634 - protein, 14 aa, synthetic construct
SAQLHRLGPNIQAD

SEQ ID NO: 43635 - protein, 14 aa, synthetic construct
SAQLHRLGPNIQAE

SEQ ID NO: 43636 - protein, 14 aa, synthetic construct
SAQLHRLGPNLQAD

SEQ ID NO: 43637 - protein, 14 aa, synthetic construct
SAQLHRLGPNLQAE

SEQ ID NO: 43638 - protein, 14 aa, synthetic construct
SAQLHRLGPNMQAD

SEQ ID NO: 43639 - protein, 14 aa, synthetic construct
SAQLHRLGPNMQAE

SEQ ID NO: 43640 - protein, 14 aa, synthetic construct
SAQLHRLGPNNQAD

SEQ ID NO: 43641 - protein, 14 aa, synthetic construct
SAQLHRLGPNNQAE

SEQ ID NO: 43642 - protein, 14 aa, synthetic construct
SAQLHRLGPNNQPQ

SEQ ID NO: 43643 - protein, 14 aa, synthetic construct
SAQLHRLGPNNQVQ

SEQ ID NO: 43644 - protein, 14 aa, synthetic construct
SAQLHRLGPNPQAD

SEQ ID NO: 43645 - protein, 14 aa, synthetic construct
SAQLHRLGPNPQAE

SEQ ID NO: 43646 - protein, 14 aa, synthetic construct
SAQLHRLGPNPQPQ

SEQ ID NO: 43647 - protein, 14 aa, synthetic construct
SAQLHRLGPNQQAE

SEQ ID NO: 43648 - protein, 14 aa, synthetic construct
SAQLHRLGPNQQAT

SEQ ID NO: 43649 - protein, 14 aa, synthetic construct
SAQLHRLGPNQQIQ

SEQ ID NO: 43650 - protein, 14 aa, synthetic construct
SAQLHRLGPNQQPQ

SEQ ID NO: 43651 - protein, 14 aa, synthetic construct
SAQLHRLGPNQQVQ

SEQ ID NO: 43652 - protein, 14 aa, synthetic construct
SAQLHRLGPNVQAA

SEQ ID NO: 43653 - protein, 14 aa, synthetic construct
SAQLHRLGPNVQAE

SEQ ID NO: 43654 - protein, 14 aa, synthetic construct
SAQLHRLGPNVQAL

SEQ ID NO: 43655 - protein, 14 aa, synthetic construct
SAQLHRLGPNVQAM

SEQ ID NO: 43656 - protein, 14 aa, synthetic construct
SAQLHRLGPNVQAQ

SEQ ID NO: 43657 - protein, 14 aa, synthetic construct
SAQLHRLGPNVQAT

SEQ ID NO: 43658 - protein, 14 aa, synthetic construct
SAQLHRLGPNYQAD

SEQ ID NO: 43659 - protein, 14 aa, synthetic construct
SAQLHRLGPNYQAE

SEQ ID NO: 43660 - protein, 14 aa, synthetic construct
SPQLHRLGPNAQAD

SEQ ID NO: 43661 - protein, 14 aa, synthetic construct
SPQLHRLGPNAQAE

SEQ ID NO: 43662 - protein, 14 aa, synthetic construct
SPQLHRLGPNEQAQ

SEQ ID NO: 43663 - protein, 14 aa, synthetic construct
YAQLHRLGPNAQAE

SEQ ID NO: 43664 - protein, 14 aa, synthetic construct
SADFRSTNGVAGHE

SEQ ID NO: 43665 - protein, 14 aa, synthetic construct
SADFRSTNGVAGQE

SEQ ID NO: 43666 - protein, 14 aa, synthetic construct
SADFRSTNGVAQAA

SEQ ID NO: 43667 - protein, 14 aa, synthetic construct
SADFRSTNGVAQAD

SEQ ID NO: 43668 - protein, 14 aa, synthetic construct
SADFRSTNGVAQAE

SEQ ID NO: 43669 - protein, 14 aa, synthetic construct
SADFRSTNGVAQAF

SEQ ID NO: 43670 - protein, 14 aa, synthetic construct
SADFRSTNGVAQAG

SEQ ID NO: 43671 - protein, 14 aa, synthetic construct
SADFRSTNGVAQAS

SEQ ID NO: 43672 - protein, 14 aa, synthetic construct
SADFRSTNGVAQAT

SEQ ID NO: 43673 - protein, 14 aa, synthetic construct
SADFRSTNGVAQFQ

SEQ ID NO: 43674 - protein, 14 aa, synthetic construct
SADFRSTNGVAQQE

SEQ ID NO: 43675 - protein, 14 aa, synthetic construct
SADFRSTNGVAQQQ

SEQ ID NO: 43676 - protein, 14 aa, synthetic construct
SADFRSTNGVMQAQ

SEQ ID NO: 43677 - protein, 14 aa, synthetic construct
SADFRSTNGVSQAE

SEQ ID NO: 43678 - protein, 14 aa, synthetic construct
SADFRSTNGVSQQE

SEQ ID NO: 43679 - protein, 14 aa, synthetic construct
SADFRSTNGVSQSE

SEQ ID NO: 43680 - protein, 14 aa, synthetic construct
SAEFRSTNGVAPAQ

SEQ ID NO: 43681 - protein, 14 aa, synthetic construct
SAEFRSTNGVAQAA

SEQ ID NO: 43682 - protein, 14 aa, synthetic construct
SAEFRSTNGVAQAE

SEQ ID NO: 43683 - protein, 14 aa, synthetic construct
SAEFRSTNGVAQAF

SEQ ID NO: 43684 - protein, 14 aa, synthetic construct
SAEFRSTNGVAQAS

SEQ ID NO: 43685 - protein, 14 aa, synthetic construct
SAEFRSTNGVAQAT

SEQ ID NO: 43686 - protein, 14 aa, synthetic construct
SALFRSTNGVAQAE

SEQ ID NO: 43687 - protein, 14 aa, synthetic construct
SANFRSTNGVAQAE

SEQ ID NO: 43688 - protein, 14 aa, synthetic construct
SAQFRSTNGVAAAE

SEQ ID NO: 43689 - protein, 14 aa, synthetic construct
SAQFRSTNGVADAE

SEQ ID NO: 43690 - protein, 14 aa, synthetic construct
SAQFRSTNGVAGAE

SEQ ID NO: 43691 - protein, 14 aa, synthetic construct
SAQFRSTNGVAPAA

SEQ ID NO: 43692 - protein, 14 aa, synthetic construct
SAQFRSTNGVAPAD

SEQ ID NO: 43693 - protein, 14 aa, synthetic construct
SAQFRSTNGVAPAE

SEQ ID NO: 43694 - protein, 14 aa, synthetic construct
SAQFRSTNGVAPAF

SEQ ID NO: 43695 - protein, 14 aa, synthetic construct
SAQFRSTNGVAPAS

SEQ ID NO: 43696 - protein, 14 aa, synthetic construct
SAQFRSTNGVAPAT

SEQ ID NO: 43697 - protein, 14 aa, synthetic construct
SAQFRSTNGVAVAE

SEQ ID NO: 43698 - protein, 14 aa, synthetic construct
SAQFRSTNGVMPAQ

SEQ ID NO: 43699 - protein, 14 aa, synthetic construct
SAQFRSTNGVMQAE

SEQ ID NO: 43700 - protein, 14 aa, synthetic construct
SAQFRSTNGVSPAQ

SEQ ID NO: 43701 - protein, 14 aa, synthetic construct
SASFRSTNGVAQAE

SEQ ID NO: 43702 - protein, 14 aa, synthetic construct
SKDFRSTNGVAPAE

SEQ ID NO: 43703 - protein, 14 aa, synthetic construct
SMDFRSTNGVAQFE

SEQ ID NO: 43704 - protein, 14 aa, synthetic construct
SNDFRSTNGVAQQE

SEQ ID NO: 43705 - protein, 14 aa, synthetic construct
SQDFRSTNGVMQAE

SEQ ID NO: 43706 - protein, 14 aa, synthetic construct
SRDFRSTNGVAPAE

SEQ ID NO: 43707 - protein, 14 aa, synthetic construct
SSDFRSTNGVAHAE

SEQ ID NO: 43708 - protein, 14 aa, synthetic construct
SSDFRSTNGVAQAE

SEQ ID NO: 43709 - protein, 14 aa, synthetic construct
SSDFRSTNGVAQFE

SEQ ID NO: 43710 - protein, 14 aa, synthetic construct
SSDFRSTNGVAQQE

SEQ ID NO: 43711 - protein, 14 aa, synthetic construct
SSDFRSTNGVAQSE

SEQ ID NO: 43712 - protein, 14 aa, synthetic construct
SSDFRSTNGVMQAE

SEQ ID NO: 43713 - protein, 14 aa, synthetic construct
SSDFRSTNGVSQAE

SEQ ID NO: 43714 - protein, 14 aa, synthetic construct
SSQFRSTNGVADAQ

SEQ ID NO: 43715 - protein, 14 aa, synthetic construct
SSQFRSTNGVAQAE

SEQ ID NO: 43716 - protein, 14 aa, synthetic construct
STDFRSTNGVAQAE

SEQ ID NO: 43717 - protein, 14 aa, synthetic construct
STDFRSTNGVAQFE

SEQ ID NO: 43718 - protein, 14 aa, synthetic construct
STDFRSTNGVAQSE

SEQ ID NO: 43719 - protein, 14 aa, synthetic construct
SVDFRSTNGVAPAE

SEQ ID NO: 43720 - protein, 14 aa, synthetic construct
SADFVSTNGVAPAQ

SEQ ID NO: 43721 - protein, 14 aa, synthetic construct
SADFVSTNGVAQAE

SEQ ID NO: 43722 - protein, 14 aa, synthetic construct
SAEFVSTNGVAQAE

SEQ ID NO: 43723 - protein, 14 aa, synthetic construct
SAHFVSTNGVAQAE

SEQ ID NO: 43724 - protein, 14 aa, synthetic construct
SALFVSTNGVAQAE

SEQ ID NO: 43725 - protein, 14 aa, synthetic construct
SAMFVSTNGVAQAE

SEQ ID NO: 43726 - protein, 14 aa, synthetic construct
SAQFVSTNGVAAAE

SEQ ID NO: 43727 - protein, 14 aa, synthetic construct
SAQFVSTNGVAGAE

SEQ ID NO: 43728 - protein, 14 aa, synthetic construct
SAQFVSTNGVAPAD

SEQ ID NO: 43729 - protein, 14 aa, synthetic construct
SAQFVSTNGVAPAE

SEQ ID NO: 43730 - protein, 14 aa, synthetic construct
SAQFVSTNGVAPAS

SEQ ID NO: 43731 - protein, 14 aa, synthetic construct
SAQFVSTNGVAPAT

SEQ ID NO: 43732 - protein, 14 aa, synthetic construct
SAQFVSTNGVAQAE

SEQ ID NO: 43733 - protein, 14 aa, synthetic construct
SAQFVSTNGVAQSE

SEQ ID NO: 43734 - protein, 14 aa, synthetic construct
SAQFVSTNGVASAE

SEQ ID NO: 43735 - protein, 14 aa, synthetic construct
SAQFVSTNGVAVAE

SEQ ID NO: 43736 - protein, 14 aa, synthetic construct
SAQFVSTNGVMPAQ

SEQ ID NO: 43737 - protein, 14 aa, synthetic construct
SAQFVSTNGVMQAE

SEQ ID NO: 43738 - protein, 14 aa, synthetic construct
SAQFVSTNGVSPAQ

SEQ ID NO: 43739 - protein, 14 aa, synthetic construct
SASFVSTNGVAQAE

SEQ ID NO: 43740 - protein, 14 aa, synthetic construct
SATFVSTNGVAQAE

SEQ ID NO: 43741 - protein, 14 aa, synthetic construct
SAVFVSTNGVAQAE

SEQ ID NO: 43742 - protein, 14 aa, synthetic construct
SCQFVSTNGVAQAE

SEQ ID NO: 43743 - protein, 14 aa, synthetic construct
SDQFVSTNGVAQAE

SEQ ID NO: 43744 - protein, 14 aa, synthetic construct
SMQFVSTNGVAQAE

SEQ ID NO: 43745 - protein, 14 aa, synthetic construct
SNQFVSTNGVAQAE

SEQ ID NO: 43746 - protein, 14 aa, synthetic construct
SQQFVSTNGVAQAE

SEQ ID NO: 43747 - protein, 14 aa, synthetic construct
SSQFVSTNGVAQAA

SEQ ID NO: 43748 - protein, 14 aa, synthetic construct
SSQFVSTNGVAQAD

SEQ ID NO: 43749 - protein, 14 aa, synthetic construct
SSQFVSTNGVAQAE

SEQ ID NO: 43750 - protein, 14 aa, synthetic construct
SSQFVSTNGVAQAS

SEQ ID NO: 43751 - protein, 14 aa, synthetic construct
SSQFVSTNGVAQAT

SEQ ID NO: 43752 - protein, 14 aa, synthetic construct
SADFRSTNGKAQAE

SEQ ID NO: 43753 - protein, 14 aa, synthetic construct
SADFRSTNGLAQAE

SEQ ID NO: 43754 - protein, 14 aa, synthetic construct
SADFRSTNGMAQAE

SEQ ID NO: 43755 - protein, 14 aa, synthetic construct
SADFRSTNGRAQAE

SEQ ID NO: 43756 - protein, 14 aa, synthetic construct
SSQFASTNGRAQAE

SEQ ID NO: 43757 - protein, 14 aa, synthetic construct
SSQFDSTNGRAQAE

SEQ ID NO: 43758 - protein, 14 aa, synthetic construct
SSQFHSTNGKAQAE

SEQ ID NO: 43759 - protein, 14 aa, synthetic construct
SSQFHSTNGVAQQE

SEQ ID NO: 43760 - protein, 14 aa, synthetic construct
SSQFISTNGRAQAE

SEQ ID NO: 43761 - protein, 14 aa, synthetic construct
SSQFNSTNGKAQAE

SEQ ID NO: 43762 - protein, 14 aa, synthetic construct
SSQFNSTNGRAQAE

SEQ ID NO: 43763 - protein, 14 aa, synthetic construct
SSQFQSTNGKAQAE

SEQ ID NO: 43764 - protein, 14 aa, synthetic construct
SSQFQSTNGRAQAE

SEQ ID NO: 43765 - protein, 14 aa, synthetic construct
SSQFQSTNGVAQQE

SEQ ID NO: 43766 - protein, 14 aa, synthetic construct
SSQFSSTNGKAQAE

SEQ ID NO: 43767 - protein, 14 aa, synthetic construct
SSQFSSTNGRAQAE

SEQ ID NO: 43768 - protein, 14 aa, synthetic construct
SSQFSSTNGVAQQE

SEQ ID NO: 43769 - protein, 14 aa, synthetic construct
SSQFTSTNGKAQAE

SEQ ID NO: 43770 - protein, 14 aa, synthetic construct
SSQFTSTNGRAQAE

SEQ ID NO: 43771 - protein, 14 aa, synthetic construct
SSQFTSTNGVAQQE

SEQ ID NO: 43772 - protein, 14 aa, synthetic construct
SSQFTSTNGVMQAE

SEQ ID NO: 43773 - protein, 14 aa, synthetic construct
SAFVESTNGRAPAQ

SEQ ID NO: 43774 - protein, 14 aa, synthetic construct
SAHVESTNGRAPAQ

SEQ ID NO: 43775 - protein, 14 aa, synthetic construct
SAHVESTNGRAQAA

SEQ ID NO: 43776 - protein, 14 aa, synthetic construct
SAHVESTNGRAQAE

SEQ ID NO: 43777 - protein, 14 aa, synthetic construct
SAHVESTNGRAQAS

SEQ ID NO: 43778 - protein, 14 aa, synthetic construct
SAHVESTNGRAQAT

SEQ ID NO: 43779 - protein, 14 aa, synthetic construct
SAIVESTNGRAQAT

SEQ ID NO: 43780 - protein, 14 aa, synthetic construct
SAIVESTNGRMQAQ

SEQ ID NO: 43781 - protein, 14 aa, synthetic construct
SAKVESTNGRAPAQ

SEQ ID NO: 43782 - protein, 14 aa, synthetic construct
SALVESTNGRAQAA

SEQ ID NO: 43783 - protein, 14 aa, synthetic construct
SALVESTNGRAQAE

SEQ ID NO: 43784 - protein, 14 aa, synthetic construct
SALVESTNGRAQAF

SEQ ID NO: 43785 - protein, 14 aa, synthetic construct
SALVESTNGRAQAS

SEQ ID NO: 43786 - protein, 14 aa, synthetic construct
SALVESTNGRAQAT

SEQ ID NO: 43787 - protein, 14 aa, synthetic construct
SALVESTNGRAQFQ

SEQ ID NO: 43788 - protein, 14 aa, synthetic construct
SALVESTNGRAWAQ

SEQ ID NO: 43789 - protein, 14 aa, synthetic construct
SALVESTNGRMQAQ

SEQ ID NO: 43790 - protein, 14 aa, synthetic construct
SAMVESTNGRAQAA

SEQ ID NO: 43791 - protein, 14 aa, synthetic construct
SAMVESTNGRAQAE

SEQ ID NO: 43792 - protein, 14 aa, synthetic construct
SAMVESTNGRAQAS

SEQ ID NO: 43793 - protein, 14 aa, synthetic construct
SAMVESTNGRAQAT

SEQ ID NO: 43794 - protein, 14 aa, synthetic construct
SANVESTNGRAQAT

SEQ ID NO: 43795 - protein, 14 aa, synthetic construct
SAQVESTNGRAPAA

SEQ ID NO: 43796 - protein, 14 aa, synthetic construct
SAQVESTNGRAPAD

SEQ ID NO: 43797 - protein, 14 aa, synthetic construct
SAQVESTNGRAPAE

SEQ ID NO: 43798 - protein, 14 aa, synthetic construct
SAQVESTNGRAPAM

SEQ ID NO: 43799 - protein, 14 aa, synthetic construct
SAQVESTNGRAPAS

SEQ ID NO: 43800 - protein, 14 aa, synthetic construct
SAQVESTNGRAPAT

SEQ ID NO: 43801 - protein, 14 aa, synthetic construct
SAQVESTNGRAPAY

SEQ ID NO: 43802 - protein, 14 aa, synthetic construct
SAQVESTNGRAQAE

SEQ ID NO: 43803 - protein, 14 aa, synthetic construct
SAQVESTNGRAQAT

SEQ ID NO: 43804 - protein, 14 aa, synthetic construct
SAQVESTNGRAQSE

SEQ ID NO: 43805 - protein, 14 aa, synthetic construct
SAQVESTNGRAQST

SEQ ID NO: 43806 - protein, 14 aa, synthetic construct
SAQVESTNGRAWAE

SEQ ID NO: 43807 - protein, 14 aa, synthetic construct
SAQVESTNGRLPAQ

SEQ ID NO: 43808 - protein, 14 aa, synthetic construct
SAQVESTNGRMQAE

SEQ ID NO: 43809 - protein, 14 aa, synthetic construct
SAQVESTNGRMQAS

SEQ ID NO: 43810 - protein, 14 aa, synthetic construct
SAQVESTNGRMQAT

SEQ ID NO: 43811 - protein, 14 aa, synthetic construct
SAQVESTNGRSPAQ

SEQ ID NO: 43812 - protein, 14 aa, synthetic construct
SARVESTNGRAPAQ

SEQ ID NO: 43813 - protein, 14 aa, synthetic construct
SARVESTNGRAQAE

SEQ ID NO: 43814 - protein, 14 aa, synthetic construct
SAVVESTNGRAQAT

SEQ ID NO: 43815 - protein, 14 aa, synthetic construct
SAYVESTNGRAPAQ

SEQ ID NO: 43816 - protein, 14 aa, synthetic construct
SAYVESTNGRAQAT

SEQ ID NO: 43817 - protein, 14 aa, synthetic construct
SDQVESTNGRAWAQ

SEQ ID NO: 43818 - protein, 14 aa, synthetic construct
SDQVESTNGRMQAQ

SEQ ID NO: 43819 - protein, 14 aa, synthetic construct
SNQVESTNGRAQAE

SEQ ID NO: 43820 - protein, 14 aa, synthetic construct
SNQVESTNGRAQAT

SEQ ID NO: 43821 - protein, 14 aa, synthetic construct
SNQVESTNGRMQAQ

SEQ ID NO: 43822 - protein, 14 aa, synthetic construct
SQQVESTNGRAQAT

SEQ ID NO: 43823 - protein, 14 aa, synthetic construct
SQQVESTNGRMQAQ

SEQ ID NO: 43824 - protein, 14 aa, synthetic construct
SSQVESTNGRAPAQ

SEQ ID NO: 43825 - protein, 14 aa, synthetic construct
SSQVESTNGRAQAA

SEQ ID NO: 43826 - protein, 14 aa, synthetic construct
SSQVESTNGRAQAD

SEQ ID NO: 43827 - protein, 14 aa, synthetic construct
SSQVESTNGRAQAE

SEQ ID NO: 43828 - protein, 14 aa, synthetic construct
SSQVESTNGRAQAF

SEQ ID NO: 43829 - protein, 14 aa, synthetic construct
SSQVESTNGRAQAG

SEQ ID NO: 43830 - protein, 14 aa, synthetic construct
SSQVESTNGRAQAM

SEQ ID NO: 43831 - protein, 14 aa, synthetic construct
SSQVESTNGRAQAN

SEQ ID NO: 43832 - protein, 14 aa, synthetic construct
SSQVESTNGRAQAQ

SEQ ID NO: 43833 - protein, 14 aa, synthetic construct
SSQVESTNGRAQAS

SEQ ID NO: 43834 - protein, 14 aa, synthetic construct
SSQVESTNGRAQAT

SEQ ID NO: 43835 - protein, 14 aa, synthetic construct
SSQVESTNGRAQAV

SEQ ID NO: 43836 - protein, 14 aa, synthetic construct
SSQVESTNGRAQAY

SEQ ID NO: 43837 - protein, 14 aa, synthetic construct
SSQVESTNGRAQFQ

SEQ ID NO: 43838 - protein, 14 aa, synthetic construct
SSQVESTNGRAQQQ

SEQ ID NO: 43839 - protein, 14 aa, synthetic construct
SSQVESTNGRAQSQ

SEQ ID NO: 43840 - protein, 14 aa, synthetic construct
SSQVESTNGRAWAQ

SEQ ID NO: 43841 - protein, 14 aa, synthetic construct
SSQVESTNGRMQAQ

SEQ ID NO: 43842 - protein, 14 aa, synthetic construct
SAQLCKPCLTNQAQ

SEQ ID NO: 43843 - DNA, 57 bp, synthetic construct; identical to SEQ ID NO: 20493
  source 1..57: mol_type = other DNA

SEQ ID NO: 43844 - DNA, 26 bp, synthetic construct
  source 1..26: mol_type = other DNA
gctatgggactattgctgtgatcgtc

SEQ ID NO: 43845 - DNA, 23 bp, synthetic construct
  source 1..23: mol_type = other DNA
ccaatataagcgacgtgctgcag

SEQ ID NO: 43846 - DNA, 21 bp, synthetic construct
  source 1..21: mol_type = other DNA
tgtggagatgaaactggctgc

SEQ ID NO: 43847 - DNA, 23 bp, synthetic construct
  source 1..23: mol_type = other DNA
agtgcaatagctgcaaagcagag

SEQ ID NO: 43848 - DNA, 22 bp, synthetic construct
  source 1..22: mol_type = other DNA
aacaagagcgtgaagctctctg

SEQ ID NO: 43849 - DNA, 19 bp, synthetic construct
  source 1..19: mol_type = other DNA
ctccaggaccccaggagtc

SEQ ID NO: 43850 - DNA, 25 bp, synthetic construct
  source 1..25: mol_type = other DNA
ggaaaacaagagtgtgaagctcacg

SEQ ID NO: 43851 - DNA, 20 bp, synthetic construct
  source 1..20: mol_type = other DNA
ggagagctgtccccacactg

SEQ ID NO: 43852 - DNA, 19 bp, synthetic construct
  source 1..19: mol_type = other DNA
ccgtgacccaggacacctc

SEQ ID NO: 43853 - DNA, 20 bp, synthetic construct
  source 1..20: mol_type = other DNA
cttcttctgcattacggggc

SEQ ID NO: 43854 - DNA, 23 bp, synthetic construct
  source 1..23: mol_type = other DNA
gccatcttaatgtcgcccttcag

SEQ ID NO: 43855 - DNA, 23 bp, synthetic construct
  source 1..23: mol_type = other DNA
tgttcccatagtaacgccaatag

SEQ ID NO: 43856 - DNA, 26 bp, synthetic construct
  source 1..26: mol_type = other DNA
gtacttggcatatgatacacttgatg

SEQ ID NO: 43857 - DNA, 20 bp, synthetic construct
  source 1..20: mol_type = other DNA
accacagtccatgccatcac

SEQ ID NO: 43858 - DNA, 20 bp, synthetic construct
  source 1..20: mol_type = other DNA
tccaccaccctgttgctgta

SEQ ID NO: 43859 - DNA, 21 bp, synthetic construct
  source 1..21: mol_type = other DNA
cgccctgatctgaggttaaat

SEQ ID NO: 43860 - DNA, 20 bp, synthetic construct
  source 1..20: mol_type = other DNA
cggagcaacagatgtgtgta

SEQ ID NO: 43861 - DNA, 23 bp, synthetic construct
  source 1..23: mol_type = other DNA
aagggacctttaccagtgatgtg

SEQ ID NO: 43862 - DNA, 21 bp, synthetic construct
  source 1..21: mol_type = other DNA
acttactctcgccttcctcgg

SEQ ID NO: 43863 - DNA, 21 bp, synthetic construct
  source 1..21: mol_type = other DNA
ctaacttgtttggtggggaac

SEQ ID NO: 43864 - DNA, 22 bp, synthetic construct
  source 1..22: mol_type = other DNA
cttcatctgcagccagtttcat

SEQ ID NO: 43865 - DNA, 27 bp, synthetic construct
  source 1..27: mol_type = other DNA
ctcgtgaggctggatctcaaaaagatg

SEQ ID NO: 43866 - DNA, 30 bp, synthetic construct; identical to SEQ ID NO: 42454
  source 1..30: mol_type = other DNA

SEQ ID NO: 43867 - DNA, 27 bp, synthetic construct
  source 1..27: mol_type = other DNA
actgggtctaagttaccatttgactgc

SEQ ID NO: 43868 - DNA, 22 bp, synthetic construct
  source 1..22: mol_type = other DNA
tcgagaccatagatgactaccc

SEQ ID NO: 43869 - DNA, 24 bp, synthetic construct
  source 1..24: mol_type = other DNA
gatctgtgttgttgcggtataatg

SEQ ID NO: 43870 - DNA, 20 bp, synthetic construct
  source 1..20: mol_type = other DNA
tcgagatggaggaaggaact

SEQ ID NO: 43871 - DNA, 21 bp, synthetic construct
  source 1..21: mol_type = other DNA
agatctgctgtaacccacaaa

SEQ ID NO: 43872 - DNA, 18 bp, synthetic construct
  source 1..18: mol_type = other DNA
tcgagcatgcgggtagat

SEQ ID NO: 43873 - DNA, 23 bp, synthetic construct
  source 1..23: mol_type = other DNA
ctgtcttggatgtgattgctgta

SEQ ID NO: 43874 - DNA, 83 bp, synthetic construct
  source 1..83: mol_type = other DNA
ctcgagaccatagatgactacccatcccatcgagcgttgtaccctattcagaggcagacattataccgcaacaacacagatct

SEQ ID NO: 43875 - DNA, 80 bp, synthetic construct
  source 1..80: mol_type = other DNA
ctcgagatggaggaaggaacttttgcgtgtgagcgttgtaccctattcagagtgacacgtttgtgggttacagcagatct

SEQ ID NO: 43876 - DNA, 83 bp, synthetic construct
  source 1..83: mol_type = other DNA
ctcgagcatgcgggtagatcatgtgggtaggagcgttgtaccctattcagaggggttacagcaatcacatccaagacagatct

SEQ ID NO: 43877 - DNA, 1635 bp, Homo sapiens
  source 1..1635: mol_type = other DNA
atggagttttcaagtccttccagagaggaatgtcccaagcctttgagtagggtaagcatcatggctggcagcctcacaggattgcttctacttcaggcagtgtcgtgggcatcaggtgcccgcccctgcatccctaaaagcttcggctacagctcggtggtgtgtgtctgcaatgccacatactgtgactcctttgaccccccgacctttcctgcccttggtaccttcagccgctatgagagtacacgcagtgggcgacggatggagctgagtatggggcccatccaggctaatcacacgggcacaggcctgctactgaccctgcagccagaacagaagttccagaaagtgaagggatttggaggggccatgacagatgctgctgctctcaacatccttgccctgtcaccccctgcccaaaatttgctacttaaatcgtacttctctgaagaaggaatcggatataacatcatccgggtacccatggccagctgtgacttctccatccgcacctacacctatgcagacacccctgatgatttccagttgcacaacttcagcctcccagaggaagataccaagctcaagatacccctgattcaccgagccctgcagttggcccagcgtcccgtttcactccttgccagcccctggacatcacccacttggctcaagaccaatggagcggtgaatgggaaggggtcactcaagggacagcccggagacatctaccaccagacctgggccagatactttgtgaagttcctggatgcctatgctgagcacaagttacagttctgggcagtgacagctgaaaatgagccttctgctgggctgttgagtggataccccttccagtgcctgggcttcacccctgaacatcagcgagacttcattgcccgtgacctaggtcctaccctcgccaacagtactcaccacaatgtccgcctactcatgctggatgaccaacgcttgctgctgccccactgggcaaaggtggtactgacagacccagaagcagctaaatatgttcatggcattgctgtacattggtacctggactttctggctccagccaaagccaccctaggggagacacaccgcctgttccccaacaccatgctctttgcctcagaggcctgtgtgggctccaagttctgggagcagagtgtgcggctaggctcctgggatcgagggatgcagtacagccacagcatcatcacgaacctcctgtaccatgtggtcggctggaccgactggaaccttgccctgaaccccgaaggaggacccaattgggtgcgtaactttgtcgacagtcccatcattgtagacatcaccaaggacacgttttacaaacagcccatgttctaccaccttggccacttcagcaagttcattcctgagggctcccagagagtggggctggttgccagtcagaagaacgacctggacgcagtggcactgatgcatcccgatggctctgctgttgtggtcgtgctaaaccgctcctctaaggatgtgcctcttaccatcaaggatcctgctgtgggcttcctggagacaatctcacctggctactccattcacacctacctgtggcgtcgccagtatccatatgacgtcccagactatgca

SEQ ID NO: 43878 - protein, 545 aa, Homo sapiens
MEFSSPSREECPKPLSRVSIMAGSLTGLLLLQAVSWASGARPCIPKSFGYSSVVCVCNATYCDSFDPPTFPALGTFSRYESTRSGRRMELSMGPIQANHTGTGLLLTLQPEQKFQKVKGFGGAMTDAAALNILALSPPAQNLLLKSYFSEEGIGYNIIRVPMASCDFSIRTYTYADTPDDFQLHNFSLPEEDTKLKIPLIHRALQLAQRPVSLLASPWTSPTWLKTNGAVNGKGSLKGQPGDIYHQTWARYFVKFLDAYAEHKLQFWAVTAENEPSAGLLSGYPFQCLGFTPEHQRDFIARDLGPTLANSTHHNVRLLMLDDQRLLLPHWAKVVLTDPEAAKYVHGIAVHWYLDFLAPAKATLGETHRLFPNTMLFASEACVGSKFWEQSVRLGSWDRGMQYSHSIITNLLYHVVGWTDWNLALNPEGGPNWVRNFVDSPIIVDITKDTFYKQPMFYHLGHFSKFIPEGSQRVGLVASQKNDLDAVALMHPDGSAVVVVLNRSSKDVPLTIKDPAVGFLETISPGYSIHTYLWRRQYPYDVPDYA

SEQ ID NO: 43879 - protein, 67 aa, synthetic construct
GSLIFGKQGTGRDNVDADKVMITNEEEIKTTNPVATESYGQVATNHQSAQAQAQTGWVQNQGILPGM

SEQ ID NO: 43880 - protein, 67 aa, synthetic construct
GVMIFGKESAGASNTALDNVMITDEEEIKATNPVATERFGTVAVNFQSSSTDPATGDVHAMGALPGM

SEQ ID NO: 43881 - protein, 67 aa, synthetic construct
GVLIFGKQGSEKTNVDIEKVMITDEEEIRTTNPVATEQYGSVSTNLQRGNRQAATADVNTQGVLPGM

SEQ ID NO: 43882 - protein, 67 aa, synthetic construct
GNLIFGKEGTTASNAELDNVMITDEEEIRTTNPVATEQYGTVANNLQSSNTAPTTGTVNHQGALPGM

SEQ ID NO: 43883 - protein, 67 aa, synthetic construct
GNLIFGKEGTTASNAELDNVMITDEEEIRTTNPVATEQYGTVANNLQSSNTAPTTRTVNDQGALPGM

SEQ ID NO: 43884 - protein, 67 aa, synthetic construct
QLIFAGPKQNGNTATVPGTLIFTSEEELAATNATDTDMWGNLPGGDQSNSNLPTVDRLTALGAVPGM

SEQ ID NO: 43885 - protein, 70 aa, synthetic construct
NTMIFNSQPANPGTTATYLEGNMLITSESETQPVNRVAYNVGGQMATNNQSSTTAPATGTYNLQEIVPGS

SEQ ID NO: 43886 - protein, 67 aa, synthetic construct
GVMIFGKESAGASNTALDNVMITDEEEIKATNPVATERFGTVAVNLQSSSTDPATGDVHVMGALPGM

SEQ ID NO: 43887 - protein, 66 aa, synthetic construct
GVLIFGKTGATNKTTLENVLMTNEEEIRPTNPVATEEYGIVSSNLQAANTAAQTQVVNNQGALPGM

SEQ ID NO: 43888 - protein, 67 aa, synthetic construct
GILIFGKQNAARDNADYSDVMLTSEEEIKTTNPVATEEYGIVADNLQQQNTAPQIGTVNSQGALPGM

SEQ ID NO: 43889 - protein, 67 aa, synthetic construct
GVLIFGKQGAGNDGVDYSQVLITDEEEIKATNPVATEEYGAVAINNQAANTQAQTGLVHNQGVIPGM

SEQ ID NO: 43890 - protein, 67 aa, synthetic construct
GVLMFGKQGAGKDNVDYSSVMLTSEEEIKTTNPVATEQYGVVADNLQQQNAAPIVGAVNSQGALPGM

SEQ ID NO: 43891 - protein, 67 aa, synthetic construct
QLIFPGPSVTGNTTTSANNLLFTSEEEIAATNPRDTDMFGQIADNNQNATTAPITGNVTAMGVLPGM

SEQ ID NO: 43892 - protein, 67 aa, synthetic construct; identical to SEQ ID NO: 43890

SEQ ID NO: 43893 - protein, 67 aa, synthetic construct
GVLMFGKQGAGRDNVDYSSVMLTSEEEIKTTNPVATEQYGVVADNLQQANTGPIVGNVNSQGALPGM

SEQ ID NO: 43894 - protein, 67 aa, synthetic construct; identical to SEQ ID NO: 43891

SEQ ID NO: 43895 - protein, 67 aa, synthetic construct
QLIFAGPNPSGNTTTSSNNLLFTSEEEIATTNPRDTDMFGQIADNNQNATTAPHIANLDAMGIVPGM

SEQ ID NO: 43896 - protein, 67 aa, synthetic construct
GTLIFGKEGTNANNADLENVMITDEEEIRTTNPVATEQYGTVSNNLQNSNAGPTTGTVNHQGALPGM

SEQ ID NO: 43897 - protein, 67 aa, synthetic construct; identical to SEQ ID NO: 43883

SEQ ID NO: 43898 - protein, 67 aa, synthetic construct; identical to SEQ ID NO: 43881

SEQ ID NO: 43899 - protein, 77 aa, synthetic construct
VMIFGKESAGASNTALDNVMITDEEEIKATNPVATERFGTVAVNFQSSSTDPATGDVHAMGALPGMVWQDRDVYLQG

SEQ ID NO: 43900 - protein, 77 aa, synthetic construct
VLIFGKQGSEKTNVDIEKVMITDEEEIRTTNPVATEQYGSVSTNLQRGNRQAATADVNTQGVLPGMVWQDRDVYLQG

SEQ ID NO: 43901 - protein, 77 aa, synthetic construct
NLIFGKEGTTASNAELDNVMITDEEEIRTTNPVATEQYGTVANNLQSSNTAPTTGTVNHQGALPGMVWQDRDVYLQG

SEQ ID NO: 43902 - protein, 75 aa, synthetic construct
IFAGPKQNGNTATVPGTLIFTSEEELAATNATDTDMWGNLPGGDQSNSLPTVDRLTALGAVPGMVWQNRDIYYQG

SEQ ID NO: 43903 - protein, 80 aa, synthetic construct
TMIFNSQPANPGTTATYLEGNMLITSESETQPVNRVAYNVGGQMATNNQSSTTAPATGTYNLQEIVPGSVWMERDVYLQG

SEQ ID NO: 43904 - protein, 77 aa, synthetic construct
VMIFGKESAGASNTALDNVMITDEEEIKATNPVATERFGTVAVNLQSSSTDPATGDVHVMGALPGMVWQDRDVYLQG

SEQ ID NO: 43905 - protein, 76 aa, synthetic construct
VLIFGKTGATNKTTLENVLMTNEEEIRPTNPVATEETGIVSSNLQAANTAAQTQVVNNQGALPGMVWQNRDVYLQG

SEQ ID NO: 43906 - protein, 77 aa, synthetic construct
ILIFGKQNAARDNADYSDVMLTSEEEIKTTNPVATEEYGIVADNLQQQNTAPQIGTVNSQGALPGMVWQNRDVYLQG

SEQ ID NO: 43907 - protein, 77 aa, synthetic construct
SLIFGKQGTGRDNVDADKVMITNEEEIKTTNPVATESYGQVATNHQSAQAQAQTGWVQNQGILPGMVWQDRDVYLQG

SEQ ID NO: 43908 - protein, 77 aa, synthetic construct
VLMFGKQGAGRDNVDYSSVMLTSEEEIKTTNPVATEQYGVVADNLQQANTGPIVGNVNSQGALPGMVWQNRDVYLQG

SEQ ID NO: 43909 - protein, 76 aa, synthetic construct
IFPGPSVTGNTTTSANNLLFTSEEEIAATNPRDTDMFGQIADNNQNATTAPITGNVTAMGVLPGMVWQNRDIYYQG

SEQ ID NO: 43910 - protein, 76 aa, synthetic construct
IFAGPNPSGNTTTSSNNLLFTSEEEIATTNPRDTDMFGQIADNNQNATTAPHIANLDAMGIVPGMVWQNRDIYYQG

SEQ ID NO: 43911 - protein, 77 aa, synthetic construct
TLIFGKEGTNANNADLENVMITDEEEIRTTNPVATEQYGTVSNNLQNSNAGPTTGTVNHQGALPGMVWQDRDVYLQG

SEQ ID NO: 43912 - protein, 736 aa, Adeno-associated virus 9; identical to SEQ ID NO: 20506

SEQ ID NO: 43913 - protein, 736 aa, synthetic construct; identical to SEQ ID NO: 42458

SEQ ID NO: 43914 - protein, 735 aa, Adeno-associated virus 1 [sequence omitted]

SEQ ID NO: 43915 - protein, 736 aa, Adeno-associated virus 2; identical to SEQ ID NO: 42460

SEQ ID NO: 43916 - protein, 734 aa, Adeno-associated virus 3B; identical to SEQ ID NO: 42462

SEQ ID NO: 43917 - protein, 724 aa, Adeno-associated virus 4; identical to SEQ ID NO: 42463

SEQ ID NO: 43918 - protein, 736 aa, Adeno-associated virus 5; identical to SEQ ID NO: 42464

SEQ ID NO: 43919 - protein, 737 aa, Adeno-associated virus 6; identical to SEQ ID NO: 42465

SEQ ID NO: 43920 - protein, 738 aa, Adeno-associated virus 7; identical to SEQ ID NO: 42466

SEQ ID NO: 43921 - protein, 738 aa, Adeno-associated virus 8; identical to SEQ ID NO: 42470

SEQ ID NO: 43922 - protein, 733 aa, Adeno-associated virus; identical to SEQ ID NO: 42471

SEQ ID NO: 43923 - protein, 742 aa, Adeno-associated virus; identical to SEQ ID NO: 42472

SEQ ID NO: 43924 - protein, 733 aa, Adeno-associated virus; identical to SEQ ID NO: 42473
  source 1..733: note = species; rh.74 isolate

SEQ ID NO: 43925 - protein, 736 aa, Adeno-associated virus 9; identical to SEQ ID NO: 20506

SEQ ID NO: 43926 - protein, 19 aa, synthetic construct
VATNHQSAQAQTGWVQNQG

SEQ ID NO: 43927 - protein, 6 aa, synthetic construct
VATNHQ

SEQ ID NO: 43928 - protein, 10 aa, synthetic construct
AQTGWVQNQG
